(19) United States
(12) Patent Application Publication
(10) Pub. No.: US 2022/0333124 A1
(43) Pub. Date: Oct. 20, 2022

(54) COMPOSITIONS AND METHODS FOR MODIFYING GENOMES

(71) Applicant: BENSON HILL, INC., St. Louis, MO (US)

(72) Inventors: Matthew BEGEMANN, St. Louis, MO (US); Gina Christine NEUMANN, Manchester, MO (US)

(73) Assignee: BENSON HILL, INC., St. Louis, MO (US)

(21) Appl. No.: 17/638,605

(22) PCT Filed: Sep. 8, 2020
(86) PCT No.: PCT/US2020/049697

§ 371 Date: Feb. 25, 2022

Related U.S. Application Data
(60) Provisional application No. 62/896,243, filed on Sep. 5, 2019.

(51) Int. Cl. C12N 15/82; C12N 15/90; C12N 15/11; C12N 9/22

(52) U.S. Cl. CPC C12N 15/8213; C12N 15/907; C12N 15/11; C12N 9/22; C12N 2800/80; C12N 2310/20; C07K 2319/09

(57) ABSTRACT

Compositions and methods for modifying genomic DNA sequences are provided. The methods produce double-stranded breaks (DSBs) at pre-determined target sites in a targeted DNA sequence, resulting in mutation, insertion, and/or deletion of DNA sequences at the targeted site(s). Compositions comprise DNA constructs comprising nucleotide sequences that encode a Cpf1 protein operably linked to a promoter that is operable in the cells of interest. The DNA constructs can be used to direct the modification of genomic DNA at pre-determined locations. Methods to use these DNA constructs to modify genomic DNA sequences are described herein. Additionally, compositions and methods for modulating the expression of genes are provided. Compositions comprise DNA constructs comprising a promoter that is operable in the cells of interest operably linked to nucleotide sequences that encode a mutated Cpf1 protein with an abolished ability to produce DSBs, optionally linked to a domain that regulates transcriptional activity. The methods can be used to up- or down-regulate the expression of genes at predetermined genomic loci.

### CROSS REFERENCE TO RELATED APPLICATIONS

[0001] This application claims priority to U.S. Provisional Application No. 62/896,243, filed on Sep. 5, 2019, the disclosure of which is incorporated herein by reference.

### FIELD OF THE INVENTION

[0002] The present invention relates to compositions and methods for editing genomic sequences at pre-selected locations and for modulating gene expression.

### REFERENCE TO A SEQUENCE LISTING SUBMITTED AS A TEXT FILE VIA EFS-WEB

[0003] The official copy of the sequence listing is submitted concurrently with the specification as a text file via EFS-Web, in compliance with the American Standard Code for Information Interchange (ASCII), with a file name of B88552_1260WO_Seq_List_9-8-20.txt, a creation date of Sep. 8, 2020, and a size of 1260 KB. The sequence listing filed via EFS-Web is part of the specification and is hereby incorporated in its entirety by reference herein.

### BACKGROUND OF THE INVENTION

[0004] Modification of genomic DNA is of immense importance for basic and applied research. Genomic modifications have the potential to elucidate and in some cases to cure the causes of disease and to provide desirable traits in the cells and/or individuals comprising said modifications. Genomic modification may include, for example, modification of plant, animal, fungal, and/or prokaryotic genomic modification. The most common methods for modifying genomic DNA tend to modify the DNA at random sites within the genome, but recent discoveries have enabled site-specific genomic modification. Such technologies rely on the creation of a DSB at the desired site. This DSB causes the recruitment of the host cell's native DNA-repair machinery to the DSB. The DNA-repair machinery may be harnessed to insert heterologous DNA at a pre-determined site, to delete native genomic DNA, or to produce point mutations, insertions, or deletions at a desired site. Of particular interest for site-specific genomic modifications are Clustered, Regularly Interspersed Short Palindromic Repeat (CRISPR) nucleases. CRISPR nucleases use a guide molecule, often a guide RNA molecule, that interacts with the nuclease and base pairs with the targeted DNA, allowing the nuclease to produce a double-stranded break (DSB) at the desired site. The production of DSBs requires the presence of a protospacer-adjacent motif (PAM) sequence; following recognition of the PAM sequence, the CRISPR nuclease is able to produce the desired DSB. Cpf1 (alternatively referred to as Cas12a) CRISPR nucleases are a class of CRISPR nucleases that have certain desirable properties relative to other CRISPR nucleases such as Cas9 nucleases. Certain Cpf1 nucleases, however are optimally active at temperatures that may not be optimal for the desired application(s). For example, some Cpf1 nucleases are optimally active at relatively high temperatures, while some genome editing applications require tissue culture or other operations to be done at relatively low (i.e., sub-optimal for Cpf1 activity) temperatures. Alternative or mutant Cpf1 nucleases with improved activity at lower temperatures would provide advantages for these applications.

[0005] One area in which genomic modification is practiced is in the modification of plant genomic DNA. Modification of plant genomic DNA is of immense importance to both basic and applied plant research. Transgenic plants with stably modified genomic DNA can have new traits such as herbicide tolerance, insect resistance, and/or accumulation of valuable proteins including pharmaceutical proteins and industrial enzymes imparted to them. The expression of native plant genes may be up- or down-regulated or otherwise altered (e.g., by changing the tissue(s) in which native plant genes are expressed), their expression may be abolished entirely, DNA sequences may be altered (e.g., through point mutations, insertions, or deletions), or new non-native genes may be inserted into a plant genome to impart new traits to the plant.

### SUMMARY OF THE INVENTION

[0006] Compositions and methods for modifying genomic DNA sequences are provided using Cpf1 CRISPR systems that retain their activity across a broad temperature range. As used herein, genomic DNA refers to linear and/or chromosomal DNA and/or to plasmid or other extrachromosomal DNA sequences present in the cell or cells of interest. The methods produce double-stranded breaks (DSBs) at pre-determined target sites in a genomic DNA sequence, resulting in mutation, insertion, and/or deletion of DNA sequences at the target site(s) in a genome. Compositions comprise DNA constructs comprising nucleotide sequences that encode a Cpf1 protein wherein said Cpf1 protein is selected from sequences having about 80% sequence identity to SEQ ID NOs:9-11, wherein the nucleotide sequences may be operably linked to a promoter that is capable of driving expression in the cells of interest. In some embodiments, the encoded Cpf1 protein comprises mutations relative to a wild-type Cpf1 protein sequence. The DNA constructs can be used to direct the modification of genomic DNA at pre-determined genomic loci. Methods to use these DNA constructs to modify genomic DNA sequences are described herein. Modified eukaryotes and eukaryotic cells, including yeast, amoebae, insects, fungi, mammals, plants, plant cells, plant parts and seeds as well as modified prokaryotes, including bacteria and archaea, are also encompassed.

[0007] Compositions and methods for modulating the expression of genes are also provided. The methods target protein(s) to pre-determined sites in a genome to effect an up- or down-regulation of a gene or genes whose expression is regulated by the targeted site in the genome. Compositions comprise DNA constructs comprising nucleotide sequences that encode a modified Cpf1 protein with diminished or abolished nuclease activity, optionally fused to a transcriptional activation or repression domain. Methods to use these DNA constructs to modify gene expression are described herein.

[0008] In a first aspect, the present disclosure provides a method of modifying a nucleotide sequence at a target site in the genome of a eukaryotic or a prokaryotic cell by introducing into the eukaryotic or prokaryotic cell (i) a DNA-targeting RNA, or a DNA polynucleotide encoding a DNA-targeting RNA, wherein the DNA-targeting RNA comprises: (a) a first segment comprising a nucleotide sequence that is complementary to a targeted sequence in the genome of said eukaryotic or prokaryotic cell; and (b) a second segment that comprises a sequence selected from the group consisting of SEQ ID NOs:12-17; and (ii) a Cpf1 polypeptide, or a polynucleotide encoding a Cpf1 polypeptide, wherein the Cpf1 polypeptide comprises: (a) an RNA-binding portion that interacts with the DNA-targeting RNA; and (b) an activity portion that exhibits site-directed enzymatic activity, wherein the Cpf1 polypeptide shares at least 95% identity with a sequence selected from the group consisting of SEQ ID NOs: 9-11, 39-43, 45, 47-53, and 67, wherein said Cpf1 polypeptide is a non-naturally occurring Cpf1 polypeptide that comprises at least one mutation relative to a wild-type Cpf1 polypeptide, wherein said genome of the eukaryotic or prokaryotic cell comprises a nuclear, plastid, mitochondrial, chromosomal, plasmid, or other intracellular DNA sequence, wherein said targeted sequence is located immediately 3′ of a PAM site in the genome, and wherein said Cpf1 polypeptide recognizes a TTTC PAM site, and has Cpf1 nuclease activity.

[0009] In some embodiments of the above aspect, the method further comprises culturing the eukaryotic or prokaryotic cell under conditions in which the Cpf1 polypeptide is expressed and cleaves the nucleotide sequence at the target site to produce a modified nucleotide sequence; and selecting a eukaryotic or prokaryotic cell comprising the modified nucleotide sequence.

[0010] In some embodiments of the above aspect, the method is performed at a temperature that is less than 32° C.

[0011] In some embodiments of the aforementioned aspect, the modified nucleotide sequence comprises insertion of heterologous DNA into the genome of the cell, deletion of a nucleotide sequence from the genome of the cell, or mutation of at least one nucleotide in the genome of the eukaryotic or prokaryotic cell.

[0012] In some embodiments of the aforementioned aspect, the modified nucleotide sequence comprises insertion of a polynucleotide that encodes a protein capable of conferring antibiotic or herbicide tolerance to transformed cells.

[0013] In another aspect, the present disclosure provides a composition comprising a polynucleotide sequence encoding a Cpf1 polypeptide, wherein the polynucleotide sequence shares at least 95% identity with a sequence selected from the group consisting of SEQ ID NOs: 25 and 27, or wherein the polynucleotide sequence encodes a Cpf1 polypeptide that shares at least 95% identity with a sequence selected from the group consisting of SEQ ID NOs: 9-11, 39-43, 45, and 47-53, wherein the Cpf1 polypeptide is a non-naturally occurring Cpf1 polypeptide that comprises at least one mutation relative to a wild-type Cpf1 polypeptide, and wherein the polynucleotide sequence encoding a Cpf1 polypeptide is operably linked to a promoter that is heterologous to the polynucleotide sequence encoding a Cpf1 polypeptide.

[0014] In some embodiments of the above aspect, the Cpf1 polypeptide comprises one or more mutations in one or more positions corresponding to positions 877 or 971 of SEQ ID NO: 3 when aligned for maximum identity.

[0015] In another aspect, the present disclosure provides a eukaryotic or prokaryotic cell comprising a nucleic acid molecule described hereinabove.

[0016] In yet another aspect, the present disclosure provides a plant cell comprising a nucleic acid molecule described hereinabove. Also provided herein is a plant regenerated from such a plant cell. Further provided herein is a seed of such a plant, wherein the seed comprises the polynucleotide sequence encoding a Cpf1 polypeptide.

[0017] In another aspect, the present disclosure provides a plant produced by a method described hereinabove, wherein the plant comprises the polynucleotide sequence encoding a Cpf1 polypeptide.

[0018] In some embodiments of the composition described hereinabove, the polynucleotide sequence encoding a Cpf1 polypeptide is codon-optimized for expression in a plant cell.

[0019] In some embodiments of the method described hereinabove, the Cpf1 polypeptide comprises a sequence selected from the group consisting of SEQ ID NOs: 9-11, 39-43, 45, and 47-53.

[0020] In some embodiments of the composition described hereinabove, the Cpf1 polypeptide comprises a sequence selected from the group consisting of SEQ ID NOs: 9-11, 39-43, 45, and 47-53.

[0021] In some embodiments of the method described hereinabove, the non-naturally occurring Cpf1 polypeptide comprises at least two mutations relative to a wild-type Cpf1 polypeptide. In certain embodiments, the non-naturally occurring Cpf1 polypeptide is selected from the group consisting of SEQ ID NOs: 9-11, 39-43, 45, 47-53, and 67.

[0022] In some embodiments of the composition described hereinabove, the non-naturally occurring Cpf1 polypeptide comprises at least two mutations relative to a wild-type Cpf1 polypeptide. In certain embodiments, the non-naturally occurring Cpf1 polypeptide is selected from the group consisting of SEQ ID NOs: 9-11, 39-43, 45, 47-53, and 67.

### BRIEF DESCRIPTION OF THE DRAWINGS

[0023] FIG. 1 depicts a MUSCLE alignment of McCpf1 (SEQ ID NO:3), Pb2Cpf1 (SEQ ID NO:5), and COE1Cpf1 (SEQ ID NO:7). An arrow indicates the residues that were mutated to arginine (McCpf1D172, Pb2Cpf1E173, and COE1Cpf1Q161).

### DETAILED DESCRIPTION OF THE INVENTION

[0024] Methods and compositions are provided for the control of gene expression involving sequence targeting, such as genome perturbation or gene-editing, that relate to the CRISPR-Cpf system and components thereof. In certain embodiments, the CRISPR enzyme is a Cpf enzyme, e.g. a Cpf1 ortholog or a mutant form of a naturally occurring Cpf1 enzyme. The methods and compositions include nucleic acids to bind target DNA sequences. This is advantageous as nucleic acids are much easier and less expensive to produce than, for example, peptides, and the specificity can be varied according to the length of the stretch where homology is sought. Complex 3-D positioning of multiple fingers, for example is not required.

[0025] Also provided are nucleic acids encoding the Cpf1 polypeptides, as well as methods of using Cpf1 polypeptides to modify chromosomal (i.e., genomic) or organellar DNA sequences of host cells. The Cpf1 polypeptides interact with specific guide RNAs (gRNAs), which direct the Cpf1 endonuclease to a target site, at which site the Cpf1 endonuclease introduces a double-stranded break that can be repaired by a DNA repair process such that the DNA sequence is modified. Since the specificity is provided by the guide RNA, the Cpf1 polypeptide is universal and can be used with different guide RNAs to target different genomic sequences. Cpf1 endonucleases have certain advantages over the Cas nucleases (e.g., Cas9) traditionally used with CRISPR arrays. For example, Cpf1-associated CRISPR arrays are processed into mature crRNAs without the requirement of an additional trans-activating crRNA (tracrRNA). Also, Cpf1-crRNA complexes can cleave target DNA preceded by a short protospacer-adjacent motif (PAM) that is often T-rich for those systems characterized to date, in contrast to the G-rich PAM following the target DNA for many Cas9 systems. Further, Cpf1 can introduce a staggered DNA double-stranded break with a 4 or 5-nucleotide (nt) 5′ overhang.

[0026] The methods disclosed herein can be used to target and modify specific chromosomal sequences and/or introduce exogenous sequences at targeted locations in the genome of eukaryotic and prokaryotic cells. The methods can further be used to introduce sequences or modify regions within organelles (e.g., chloroplasts and/or mitochondria). Furthermore, the targeting is specific with limited off target effects.

### I. Cpf1 Endonucleases

[0027] Provided herein are Cpf1 endonucleases, and fragments and variants thereof, for use in modifying genomes. As used herein, the term Cpf1 (used interchangeably with “Cas12a”) endonucleases or Cpf1 polypeptides refers to homologs, orthologs, and variants of the Cpf1 polypeptides set forth in SEQ ID NOs: 3, 5, 7, 9-11, 36-38, 28, and 29. In certain embodiments, the Cpf1 polypeptides of the invention comprise mutations relative to the wild-type sequence. In some preferred embodiments, the wild-type Cpf1 polypeptide shares at least 80% identity with a sequence selected from the group consisting of SEQ ID NOs:3, 5, and 7 and the mutant Cpf1 polypeptide shares at least 80% identity with a sequence selected from the group consisting of SEQ ID NOs:9-11 and 36-38, and comprises an arginine residue at the amino acid corresponding to position D172 in SEQ ID NO:3. Typically, Cpf1 endonucleases can act without the use of tracrRNAs and can introduce a staggered DNA double-strand break. In general, Cpf1 polypeptides comprise at least one RNA recognition and/or RNA binding domain. RNA recognition and/or RNA binding domains interact with guide RNAs. Typically, the guide RNA comprises a region with a stem-loop structure that interacts with the Cpf1 polypeptide. This stem-loop often comprises the sequence UCUACN3-5GUAGAU (SEQ ID NOs:15-17, encoded by SEQ ID NOs:12-14), with “UCUAC” and “GUAGA” base-pairing to form the stem of the stem-loop. N3-5 denotes that any base may be present at this location, and 3, 4, or 5 nucleotides may be included at this location. Cpf1 polypeptides can also comprise nuclease domains (i.e., DNase or RNase domains), DNA binding domains, helicase domains, RNAse domains, protein-protein interaction domains, dimerization domains, as well as other domains. In specific embodiments, a Cpf1 polypeptide, or a polynucleotide encoding a Cpf1 polypeptide, comprises: an RNA-binding portion that interacts with the DNA-targeting RNA, and an activity portion that exhibits site-directed enzymatic activity, such as a RuvC endonuclease domain. As used herein, site-directed enzymatic activity or site-directed enzyme activity refers the to the ability of the enzyme to be directed to a nucleic acid target site and create a single or double strand cleavage of the nucleic acid. In specific embodiments, the nuclease is directed to the target site by a DNA-targeting RNA.

[0028] Cpf1 polypeptides can be wild type Cpf1 polypeptides, modified Cpf1 polypeptides, or a fragment of a wild type or modified Cpf1 polypeptide. The Cpf1 polypeptide can be modified to increase nucleic acid binding affinity and/or specificity, alter an enzymatic activity, and/or change another property of the protein. For example, nuclease (i.e., DNase, RNase) domains of the Cpf1 polypeptide can be modified, deleted, or inactivated. Alternatively, the Cpf1 polypeptide can be truncated to remove domains that are not essential for the function of the protein.

[0029] In some embodiments, the Cpf1 polypeptide can be derived from a wild type Cpf1 polypeptide or fragment thereof. In other embodiments, the Cpf1 polypeptide can be derived from a modified Cpf1 polypeptide. For example, the amino acid sequence of the Cpf1 polypeptide can be modified to alter one or more properties (e.g., optimal temperature range for activity, PAM preferences, nuclease activity, affinity, stability, etc.) of the protein. Alternatively, domains of the Cpf1 polypeptide not involved in RNA-guided cleavage can be eliminated from the protein such that the modified Cpf1 polypeptide is smaller than the wild type Cpf1 polypeptide.

[0030] In general, a Cpf1 polypeptide comprises at least one nuclease (i.e., DNase) domain, but does not contain an HNH domain such as the one found in Cas9 proteins. For example, a Cpf1 polypeptide can comprise a RuvC-like nuclease domain. In some embodiments, the Cpf1 polypeptide can be modified to inactivate the nuclease domain so that it is no longer functional. In some embodiments in which one of the nuclease domains is inactive, the Cpf1 polypeptide does not cleave double-stranded DNA. In specific embodiments, the mutated Cpf1 polypeptide comprises a mutation in a position corresponding to positions 877 or 971 of SEQ ID NO:3 when aligned for maximum identity that reduces or eliminates the nuclease activity. For example, an aspartate to alanine (D917A) conversion and glutamate to alanine (E1006A) in a RuvC-like domain completely inactivated the DNA cleavage activity of FnCpf1 (a variant Cpf1 from Francisella novicida, SEQ ID NO: 29), while aspartate to alanine (D1255A) significantly reduced cleavage activity (Zetsche et al. (2015) Cell 163: 759-771). The nuclease domain can be modified using well-known methods, such as site-directed mutagenesis, PCR-mediated mutagenesis, and total gene synthesis, as well as other methods known in the art. Cpf1 proteins with inactivated nuclease domains (dCpf1 proteins) can be used to modulate gene expression without modifying DNA sequences. In certain embodiments, a dCpf1 protein may be targeted to particular regions of a genome such as promoters for a gene or genes of interest through the use of appropriate gRNAs. The dCpf1 protein can bind to the desired region of DNA and may interfere with RNA polymerase binding to this region of DNA and/or with the binding of transcription factors to this region of DNA. This technique may be used to up- or down-regulate the expression of one or more genes of interest. In certain other embodiments, the dCpf1 protein may be fused to a repressor domain to further downregulate the expression of a gene or genes whose expression is regulated by interactions of RNA polymerase, transcription factors, or other transcriptional regulators with the region of chromosomal DNA targeted by the gRNA. In certain other embodiments, the dCpf1 protein may be fused to an activation domain to effect an upregulation of a gene or genes whose expression is regulated by interactions of RNA polymerase, transcription factors, or other transcriptional regulators with the region of chromosomal DNA targeted by the gRNA.

[0031] The Cpf1 polypeptides disclosed herein can further comprise at least one nuclear localization signal (NLS). In general, an NLS comprises a stretch of basic amino acids. Nuclear localization signals are known in the art (see, e.g., Lange et al., J. Biol. Chem. (2007) 282:5101-5105). The NLS can be located at the N-terminus, the C-terminus, or in an internal location of the Cpf1 polypeptide. In some embodiments, the Cpf1 polypeptide can further comprise at least one cell-penetrating domain. The cell-penetrating domain can be located at the N-terminus, the C-terminus, or in an internal location of the protein.

[0032] The Cpf1 polypeptide disclosed herein can further comprise at least one plastid targeting signal peptide, at least one mitochondrial targeting signal peptide, or a signal peptide targeting the Cpf1 polypeptide to both plastids and mitochondria. Plastid, mitochondrial, and dual-targeting signal peptide localization signals are known in the art (see, e.g., Nassoury and Morse (2005) Biochim Biophys Acta 1743:5-19; Kunze and Berger (2015) Front Physiol dx.doi.org/10.3389/fphys.2015.00259; Herrmann and Neupert (2003) IUBMB Life 55:219-225; Soll (2002) Curr Opin Plant Biol 5:529-535; Carrie and Small (2013) Biochim Biophys Acta 1833:253-259; Carrie et al. (2009) FEBS J276:1187-1195; Silva-Filho (2003) Curr Opin Plant Biol 6:589-595; Peeters and Small (2001) Biochim Biophys Acta 1541:54-63; Murcha et al. (2014) J Exp Bot 65:6301-6335; Mackenzie (2005) Trends Cell Biol 15:548-554; Glaser et al. (1998) Plant Mol Biol 38:311-338). The plastid, mitochondrial, or dual-targeting signal peptide can be located at the N-terminus, the C-terminus, or in an internal location of the Cpf1 polypeptide.

[0033] In still other embodiments, the Cpf1 polypeptide can also comprise at least one marker domain. Non-limiting examples of marker domains include fluorescent proteins, purification tags, and epitope tags. In certain embodiments, the marker domain can be a fluorescent protein. Non limiting examples of suitable fluorescent proteins include green fluorescent proteins (e.g., GFP, GFP-2, tagGFP, turboGFP, EGFP, Emerald, Azami Green, Monomeric Azami Green, CopGFP, AceGFP, ZsGreen1), yellow fluorescent proteins (e.g. YFP, EYFP, Citrine, Venus, YPet, PhiYFP, ZsYellow1), blue fluorescent proteins (e.g. EBFP, EBFP2, Azurite, mKalama1, GFPuv, Sapphire, T-sapphire), cyan fluorescent proteins (e.g. ECFP, Cerulean, CyPet, AmCyan1, Midoriishi-Cyan), red fluorescent proteins (mKate, mKate2, mPlum, DsRed monomer, mCherry, mRFP1, DsRed-Express, DsRed2, DsRed-Monomer, HcRed-Tandem, HcRed1, AsRed2, eqFP611, mRasberry, mStrawberry, Jred), and orange fluorescent proteins (mOrange, mKO, Kusabira-Orange, Monomeric Kusabira-Orange, mTangerine, tdTomato) or any other suitable fluorescent protein. In other embodiments, the marker domain can be a purification tag and/or an epitope tag. Exemplary tags include, but are not limited to, glutathione-S-transferase (GST), chitin binding protein (CBP), maltose binding protein, thioredoxin (TRX), poly(NANP), tandem affinity purification (TAP) tag, myc, AcV5, AU1, AU5, E, ECS, E2, FLAG, HA, nus, Softag 1, Softag 3, Strep, SBP, Glu-Glu, HSV, KT3, S, 51, T7, V5, VSV-G, 6×His, biotin carboxyl carrier protein (BCCP), and calmodulin.

[0034] In certain embodiments, the Cpf1 polypeptide may be part of a protein-RNA complex comprising a guide RNA. The guide RNA interacts with the Cpf1 polypeptide to direct the Cpf1 polypeptide to a specific target site, wherein the 5′ end of the guide RNA can base pair with a specific protospacer sequence of the nucleotide sequence of interest in the plant genome, whether part of the nuclear, plastid, and/or mitochondrial genome. As used herein, the term “DNA-targeting RNA” refers to a guide RNA that interacts with the Cpf1 polypeptide and the target site of the nucleotide sequence of interest in the genome of a plant cell. A DNA-targeting RNA, or a DNA polynucleotide encoding a DNA-targeting RNA, can comprise: a first segment comprising a nucleotide sequence that is complementary to a sequence in the target DNA, and a second segment that interacts with a Cpf1 polypeptide.

[0035] The polynucleotides encoding Cpf1 polypeptides disclosed herein can be used to isolate corresponding sequences from other prokaryotic or eukaryotic organisms. In this manner, methods such as PCR, hybridization, and the like can be used to identify such sequences based on their sequence homology or identity to the sequences set forth herein. Sequences isolated based on their sequence identity to the entire Cpf1 sequences set forth herein or to variants and fragments thereof are encompassed by the present invention. Such sequences include sequences that are orthologs of the disclosed Cpf1 sequences. “Orthologs” is intended to mean genes derived from a common ancestral gene and which are found in different species as a result of speciation. Genes found in different species are considered orthologs when their nucleotide sequences and/or their encoded protein sequences share at least about 75%, about 80%, about 85%, about 90%, about 91%, about 92%, about 93%, about 94%, about 95%, about 96%, about 97%, about 98%, about 99%, or greater sequence identity. Functions of orthologs are often highly conserved among species. Thus, isolated polynucleotides that encode polypeptides having Cpf1 endonuclease activity and which share at least about 75% or more sequence identity to the sequences disclosed herein, are encompassed by the present invention. As used herein, Cpf1 endonuclease activity refers to CRISPR endonuclease activity wherein, a guide RNA (gRNA) associated with a Cpf1 polypeptide causes the Cpf1-gRNA complex to bind to a pre-determined nucleotide sequence that is complementary to the gRNA; and wherein Cpf1 activity can introduce a double-stranded break at or near the site targeted by the gRNA. In certain embodiments, this double-stranded break may be a staggered DNA double-stranded break. As used herein a “staggered DNA double-stranded break” can result in a double strand break with about 1, about 2, about 3, about 4, about 5, about 6, about 7, about 8, about 9, or about 10 nucleotides of overhang on either the 3′ or 5′ ends following cleavage. In specific embodiments, the Cpf1 polypeptide introduces a staggered DNA double-stranded break with a 4 or 5-nt 5′ overhang. The double strand break can occur at or near the sequence to which the DNA-targeting RNA (e.g., guide RNA) sequence is targeted.

[0036] Fragments and variants of the Cpf1 polynucleotides and Cpf1 amino acid sequences encoded thereby that retain Cpf1 nuclease activity are encompassed herein. By “Cpf1 nuclease activity” is intended the binding or hybridization of a pre-determined DNA sequence as mediated by a guide RNA (i.e., through base-pairing of the guide RNA sequence with the targeted DNA sequence when the targeted DNA sequence is located downstream of a PAM sequence that is recognized by the Cpf1 nuclease). In embodiments wherein the Cpf1 nuclease comprises a functional RuvC domain, Cpf1 nuclease activity can further comprise double-strand break induction. By “fragment” is intended a portion of the polynucleotide or a portion of the amino acid sequence. “Variants” is intended to mean substantially similar sequences. For polynucleotides, a variant comprises a polynucleotide having deletions (i.e., truncations) at the 5′ and/or 3′ end; deletion and/or addition of one or more nucleotides at one or more internal sites in the native polynucleotide; and/or substitution of one or more nucleotides at one or more sites in the native polynucleotide. As used herein, a “native” polynucleotide or polypeptide comprises a naturally occurring nucleotide sequence or amino acid sequence, respectively. Generally, variants of a particular polynucleotide of the invention will have at least about 75%, 80%, 85%, 90%, 91%, 92%, 93%, 94%, 95%, 96%, 97%, 98%, 99% or more sequence identity to that particular polynucleotide as determined by sequence alignment programs and parameters as described elsewhere herein.

[0037] “Variant” amino acid or protein is intended to mean an amino acid or protein derived from the native amino acid or protein by deletion (so-called truncation) of one or more amino acids at the N-terminal and/or C-terminal end of the native protein; deletion and/or addition of one or more amino acids at one or more internal sites in the native protein; or substitution of one or more amino acids at one or more sites in the native protein. Variant proteins encompassed by the present invention are biologically active, that is they continue to possess the desired biological activity of the native protein. Biologically active variants of a native polypeptide will have at least about 80%, 85%, 90%, 91%, 92%, 93%, 94%, 95%, 96%, 97%, 98%, 99% or more sequence identity to the amino acid sequence for the native sequence as determined by sequence alignment programs and parameters described herein. A biologically active variant of a protein of the invention may differ from that protein by as few as 1-15 amino acid residues, as few as 1-10, such as 6-10, as few as 5, as few as 4, 3, 2, or even 1 amino acid residue.

[0038] Variant sequences may also be identified by analysis of existing databases of sequenced genomes. In this manner, corresponding sequences can be identified and used in the methods of the invention.

[0039] Methods of alignment of sequences for comparison are well known in the art. Thus, the determination of percent sequence identity between any two sequences can be accomplished using a mathematical algorithm. Non-limiting examples of such mathematical algorithms are the algorithm of Myers and Miller (1988) CABIOS 4:11-17; the local alignment algorithm of Smith et al. (1981) Adv. Appl. Math. 2:482; the global alignment algorithm of Needleman and Wunsch (1970) J Mol. Biol. 48:443-453; the search-for-local alignment method of Pearson and Lipman (1988) Proc. Natl. Acad. Sci. 85:2444-2448; the algorithm of Karlin and Altschul (1990) Proc. Natl. Acad. Sci. USA 87:2264-2268, modified as in Karlin and Altschul (1993) Proc. Natl. Acad. Sci. USA 90:5873-5877.

[0040] Computer implementations of these mathematical algorithms can be utilized for comparison of sequences to determine sequence identity. Such implementations include, but are not limited to: CLUSTAL in the PC/Gene program (available from Intelligenetics, Mountain View, Calif.); the ALIGN program (Version 2.0) and GAP, BESTFIT, BLAST, FASTA, and TFASTA in the GCG Wisconsin Genetics Software Package, Version 10 (available from Accelrys Inc., 9685 Scranton Road, San Diego, Calif., USA). Alignments using these programs can be performed using the default parameters. The CLUSTAL program is well described by Higgins et al. (1988) Gene 73:237-244; Higgins et al. (1989) CABIOS 5:151-153; Corpet et al. (1988) Nucleic Acids Res. 16:10881-90; Huang et al. (1992) CABIOS 8:155-65; and Pearson et al. (1994) Meth. Mol. Biol. 24:307-331. The ALIGN program is based on the algorithm of Myers and Miller (1988) supra. A PAM120 weight residue table, a gap length penalty of 12, and a gap penalty of 4 can be used with the ALIGN program when comparing amino acid sequences. The BLAST programs of Altschul et al (1990) J Mol. Biol. 215:403 are based on the algorithm of Karlin and Altschul (1990) supra. BLAST nucleotide searches can be performed with the BLASTN program, score=100, wordlength=12, to obtain nucleotide sequences homologous to a nucleotide sequence encoding a protein of the invention. BLAST protein searches can be performed with the BLASTX program, score=50, wordlength=3, to obtain amino acid sequences homologous to a protein or polypeptide of the invention. To obtain gapped alignments for comparison purposes, Gapped BLAST (in BLAST 2.0) can be utilized as described in Altschul et al. (1997) Nucleic Acids Res. 25:3389. Alternatively, PSI-BLAST (in BLAST 2.0) can be used to perform an iterated search that detects distant relationships between molecules. See Altschul et al. (1997) supra. When utilizing BLAST, Gapped BLAST, PSI-BLAST, the default parameters of the respective programs (e.g., BLASTN for nucleotide sequences, BLASTX for proteins) can be used. See the website at www.ncbi.nlm.nih.gov. Alignment may also be performed manually by inspection.

[0041] The nucleic acid molecules encoding Cpf1 polypeptides, or fragments or variants thereof, can be codon optimized for expression in a plant of interest or other cell or organism of interest. A “codon-optimized gene” is a gene having its frequency of codon usage designed to mimic the frequency of preferred codon usage of the host cell. Nucleic acid molecules can be codon optimized, either wholly or in part. Because any one amino acid (except for methionine and tryptophan) is encoded by a number of codons, the sequence of the nucleic acid molecule may be changed without changing the encoded amino acid. Codon optimization is when one or more codons are altered at the nucleic acid level such that the amino acids are not changed but expression in a particular host organism is increased. Those having ordinary skill in the art will recognize that codon tables and other references providing preference information for a wide range of organisms are available in the art (see, e.g., Zhang et al. (1991) Gene 105:61-72; Murray et al. (1989) Nucl. Acids Res. 17:477-508). Methodology for optimizing a nucleotide sequence for expression in a plant is provided, for example, in U.S. Pat. No. 6,015,891, and the references cited therein. Examples of codon optimized polynucleotides for expression in a plant are set forth in SEQ ID NOs: 24-27.

### II. Fusion Proteins

[0042] Fusion proteins are provided herein comprising a Cpf1 polypeptide, or a fragment or variant thereof, and an effector domain. The Cpf1 polypeptide can be directed to a target site by a guide RNA, at which site the effector domain can modify or effect the targeted nucleic acid sequence. The effector domain can be a cleavage domain, an epigenetic modification domain, a transcriptional activation domain, or a transcriptional repressor domain. The fusion protein can further comprise at least one additional domain chosen from a nuclear localization signal, plastid signal peptide, mitochondrial signal peptide, signal peptide capable of protein trafficking to multiple subcellular locations, a cell-penetrating domain, or a marker domain, any of which can be located at the N-terminus, C-terminus, or an internal location of the fusion protein. The Cpf1 polypeptide can be located at the N-terminus, the C-terminus, or in an internal location of the fusion protein. The Cpf1 polypeptide can be directly fused to the effector domain, or can be fused with a linker. In specific embodiments, the linker sequence fusing the Cpf1 polypeptide with the effector domain can be at least 1, 2, 3, 4, 5, 6, 7, 8, 9, 10, 15, 20, 25, 30, 40, or 50 amino acids in length. For example, the linker can range from 1-5, 1-10, 1-20, 1-50, 2-3, 3-10, 3-20, 5-20, or 10-50 amino acids in length.

[0043] In some embodiments, the Cpf1 polypeptide of the fusion protein can be derived from a wild type Cpf1 protein. The Cpf1-derived protein can be a modified variant or a fragment. In some embodiments, the Cpf1 polypeptide can be modified to contain a nuclease domain (e.g. a RuvC domain) with reduced or eliminated nuclease activity. For example, the Cpf1-derived polypeptide can be modified such that the nuclease domain is deleted or mutated such that it is no longer functional (i.e., the nuclease activity is absent). Particularly, a Cpf1 polypeptide can have a mutation in a position corresponding to positions 877 and/or 971 of SEQ ID NO:3 when aligned for maximum identity. For example, an aspartate to alanine (D917A) conversion and glutamate to alanine (E1006A) in a RuvC-like domain completely inactivated the DNA cleavage activity of FnCpf1 (SEQ ID NO:29), while aspartate to alanine (D1255A) significantly reduced cleavage activity (Zetsche et al. (2015) Cell 163: 759-771). The nuclease domain can be inactivated by one or more deletion mutations, insertion mutations, and/or substitution mutations using known methods, such as site-directed mutagenesis, PCR-mediated mutagenesis, and total gene synthesis, as well as other methods known in the art. In an exemplary embodiment, the Cpf1 polypeptide of the fusion protein is modified by mutating the RuvC-like domain such that the Cpf1 polypeptide has no nuclease activity.

[0044] The fusion protein also comprises an effector domain located at the N-terminus, the C-terminus, or in an internal location of the fusion protein. In some embodiments, the effector domain is a cleavage domain. As used herein, a “cleavage domain” refers to a domain that cleaves DNA. The cleavage domain can be obtained from any endonuclease or exonuclease. Non-limiting examples of endonucleases from which a cleavage domain can be derived include, but are not limited to, restriction endonucleases and homing endonucleases. See, for example, New England Biolabs Catalog or Belfort et al. (1997) Nucleic Acids Res. 25:3379-3388. Additional enzymes that cleave DNA are known (e.g., 51 Nuclease; mung bean nuclease; pancreatic DNase I; micrococcal nuclease; yeast HO endonuclease). See also Linn et al. (eds.) Nucleases, Cold Spring Harbor Laboratory Press, 1993. One or more of these enzymes (or functional fragments thereof) can be used as a source of cleavage domains.

[0045] In some embodiments, the cleavage domain can be derived from a type II-S endonuclease. Type II-S endonucleases cleave DNA at sites that are typically several base pairs away from the recognition site and, as such, have separable recognition and cleavage domains. These enzymes generally are monomers that transiently associate to form dimers to cleave each strand of DNA at staggered locations. Non-limiting examples of suitable type II-S endonucleases include BfiI, BpmI, BsaI, BsgI, BsmBI, BsmI, BspMI, FokI, MbolI, and SapI.

[0046] In certain embodiments, the type II-S cleavage can be modified to facilitate dimerization of two different cleavage domains (each of which is attached to a Cpf1 polypeptide or fragment thereof). In embodiments wherein the effector domain is a cleavage domain the Cpf1 polypeptide can be modified as discussed herein such that its endonuclease activity is eliminated. For example, the Cpf1 polypeptide can be modified by mutating the RuvC-like domain such that the polypeptide no longer exhibits endonuclease activity.

[0047] In other embodiments, the effector domain of the fusion protein can be an epigenetic modification domain. In general, epigenetic modification domains alter histone structure and/or chromosomal structure without altering the DNA sequence. Changes in histone and/or chromatin structure can lead to changes in gene expression. Examples of epigenetic modification include, without limit, acetylation or methylation of lysine residues in histone proteins, and methylation of cytosine residues in DNA. Non-limiting examples of suitable epigenetic modification domains include histone acetyltansferase domains, histone deacetylase domains, histone methyltransferase domains, histone demethylase domains, DNA methyltransferase domains, and DNA demethylase domains.

[0048] In embodiments in which the effector domain is a histone acetyltansferase (HAT) domain, the HAT domain can be derived from EP300 (i.e., E1A binding protein p300), CREBBP (i.e., CREB-binding protein), CDY1, CDY2, CDYL1, CLOCK, ELP3, ESA1, GCN5 (KAT2A), HAT1, KAT2B, KAT5, MYST1, MYST2, MYST3, MYST4, NCOA1, NCOA2, NCOA3, NCOAT, P/CAF, Tip60, TAFII250, or TF3C4. In embodiments wherein the effector domain is an epigenetic modification domain, the Cpf1 polypeptide can be modified as discussed herein such that its endonuclease activity is eliminated. For example, the Cpf1 polypeptide can be modified by mutating the RuvC-like domain such that the polypeptide no longer possesses nuclease activity.

[0049] In some embodiments, the effector domain of the fusion protein can be a transcriptional activation domain. In general, a transcriptional activation domain interacts with transcriptional control elements and/or transcriptional regulatory proteins (i.e., transcription factors, RNA polymerases, etc.) to increase and/or activate transcription of one or more genes. In some embodiments, the transcriptional activation domain can be, without limit, a herpes simplex virus VP16 activation domain, VP64 (which is a tetrameric derivative of VP16), a NFκB p65 activation domain, p53 activation domains 1 and 2, a CREB (cAMP response element binding protein) activation domain, an E2A activation domain, and an NFAT (nuclear factor of activated T-cells) activation domain. In other embodiments, the transcriptional activation domain can be Gal4, Gcn4, MLL, Rtg3, Gln3, Oaf1, Pip2, Pdr1, Pdr3, Pho4, and Leu3. The transcriptional activation domain may be wild type, or it may be a modified version of the original transcriptional activation domain. In some embodiments, the effector domain of the fusion protein is a VP16 or VP64 transcriptional activation domain. In embodiments wherein the effector domain is a transcriptional activation domain, the Cpf1 polypeptide can be modified as discussed herein such that its endonuclease activity is eliminated. For example, the Cpf1 polypeptide can be modified by mutating the RuvC-like domain such that the polypeptide no longer possesses nuclease activity.

[0050] In still other embodiments, the effector domain of the fusion protein can be a transcriptional repressor domain. In general, a transcriptional repressor domain interacts with transcriptional control elements and/or transcriptional regulatory proteins (i.e., transcription factors, RNA polymerases, etc.) to decrease and/or terminate transcription of one or more genes. Non-limiting examples of suitable transcriptional repressor domains include inducible cAMP early repressor (ICER) domains, Kruppel-associated box A (KREB-A) repressor domains, YY1 glycine rich repressor domains, Sp1-like repressors, E(spl) repressors, I.kappa.B repressor, and MeCP2. In embodiments wherein the effector domain is a transcriptional repressor domain, the Cpf1 polypeptide can be modified as discussed herein such that its endonuclease activity is eliminated. For example, the Cpf1 polypeptide can be modified by mutating the RuvC-like domain such that the polypeptide no longer possesses nuclease activity.

[0051] In some embodiments, the fusion protein further comprises at least one additional domain. Non-limiting examples of suitable additional domains include nuclear localization signals, cell-penetrating or translocation domains, and marker domains.

[0052] When the effector domain of the fusion protein is a cleavage domain, a dimer comprising at least one fusion protein can form. The dimer can be a homodimer or a heterodimer. In some embodiments, the heterodimer comprises two different fusion proteins. In other embodiments, the heterodimer comprises one fusion protein and an additional protein.

[0053] The dimer can be a homodimer in which the two fusion protein monomers are identical with respect to the primary amino acid sequence. In one embodiment where the dimer is a homodimer, the Cpf1 polypeptide can be modified such that the endonuclease activity is eliminated. In certain embodiments wherein the Cpf1 polypeptide is modified such that endonuclease activity is eliminated, each fusion protein monomer can comprise an identical Cpf1 polypeptide and an identical cleavage domain. The cleavage domain can be any cleavage domain, such as any of the exemplary cleavage domains provided herein. In such embodiments, specific guide RNAs would direct the fusion protein monomers to different but closely adjacent sites such that, upon dimer formation, the nuclease domains of the two monomers would create a double stranded break in the target DNA.

[0054] The dimer can also be a heterodimer of two different fusion proteins. For example, the Cpf1 polypeptide of each fusion protein can be derived from a different Cpf1 polypeptide or from an orthologous Cpf1 polypeptide from a different bacterial species. For example, each fusion protein can comprise a Cpf1 polypeptide derived from a different bacterial species. In these embodiments, each fusion protein would recognize a different target site (i.e., specified by the protospacer and/or PAM sequence). For example, the guide RNAs could position the heterodimer to different but closely adjacent sites such that their nuclease domains produce an effective double stranded break in the target DNA.

[0055] Alternatively, two fusion proteins of a heterodimer can have different effector domains. In embodiments in which the effector domain is a cleavage domain, each fusion protein can contain a different modified cleavage domain. In these embodiments, the Cpf1 polypeptide can be modified such that their endonuclease activities are eliminated. The two fusion proteins forming a heterodimer can differ in both the Cpf1 polypeptide domain and the effector domain.

[0056] In any of the above-described embodiments, the homodimer or heterodimer can comprise at least one additional domain chosen from nuclear localization signals (NLSs), plastid signal peptides, mitochondrial signal peptides, signal peptides capable of trafficking proteins to multiple subcellular locations, cell-penetrating, translocation domains and marker domains, as detailed above. In any of the above-described embodiments, one or both of the Cpf1 polypeptides can be modified such that endonuclease activity of the polypeptide is eliminated or modified.

[0057] The heterodimer can also comprise one fusion protein and an additional protein. For example, the additional protein can be a nuclease. In one embodiment, the nuclease is a zinc finger nuclease. A zinc finger nuclease comprises a zinc finger DNA binding domain and a cleavage domain. A zinc finger recognizes and binds three (3) nucleotides. A zinc finger DNA binding domain can comprise from about three zinc fingers to about seven zinc fingers. The zinc finger DNA binding domain can be derived from a naturally occurring protein or it can be engineered. See, for example, Beerli et al. (2002) Nat. Biotechnol. 20:135-141; Pabo et al. (2001) Ann. Rev. Biochem. 70:313-340; Isalan et al. (2001) Nat. Biotechnol. 19:656-660; Segal et al. (2001) Curr. Opin. Biotechnol. 12:632-637; Choo et al. (2000) Curr. Opin. Struct. Biol. 10:411-416; Zhang et al. (2000) J. Biol. Chem. 275(43):33850-33860; Doyon et al. (2008) Nat. Biotechnol. 26:702-708; and Santiago et al. (2008) Proc. Natl. Acad. Sci. USA 105:5809-5814. The cleavage domain of the zinc finger nuclease can be any cleavage domain detailed herein. In some embodiments, the zinc finger nuclease can comprise at least one additional domain chosen from nuclear localization signals, plastid signal peptides, mitochondrial signal peptides, signal peptides capable of trafficking proteins to multiple subcellular locations, cell-penetrating or translocation domains, which are detailed herein.

[0058] In certain embodiments, any of the fusion proteins detailed above or a dimer comprising at least one fusion protein may be part of a protein-RNA complex comprising at least one guide RNA. A guide RNA interacts with the Cpf1 polypeptide of the fusion protein to direct the fusion protein to a specific target site, wherein the 5′ end of the guide RNA base pairs with a specific protospacer sequence.

### III. Nucleic Acids Encoding Cpf1 Polypeptides or Fusion Proteins

[0059] Nucleic acids encoding any of the Cpf1 polypeptides or fusion proteins described herein are provided. The nucleic acid can be RNA or DNA. Examples of polynucleotides that encode Cpf1 polypeptides are set forth in SEQ ID NOs: 4, 6, 8, and 24-27. In one embodiment, the nucleic acid encoding the Cpf1 polypeptide or fusion protein is mRNA. The mRNA can be 5′ capped and/or 3′ polyadenylated. In another embodiment, the nucleic acid encoding the Cpf1 polypeptide or fusion protein is DNA. The DNA can be present in a vector.

[0060] Nucleic acids encoding the Cpf1 polypeptide or fusion proteins can be codon optimized for efficient translation into protein in the plant cell of interest. Programs for codon optimization are available in the art (e.g., OPTIMIZER at genomes.urv.es/OPTIMIZER; OptimumGene™ from GenScript at www.genscript.com/codon_opt.html).

[0061] In certain embodiments, DNA encoding the Cpf1 polypeptide or fusion protein can be operably linked to at least one promoter sequence. The DNA coding sequence can be operably linked to a promoter control sequence for expression in a host cell of interest. In some embodiments, the host cell is a plant cell. “Operably linked” is intended to mean a functional linkage between two or more elements. For example, an operable linkage between a promoter and a coding region of interest (e.g., region coding for a Cpf1 polypeptide or guide RNA) is a functional link that allows for expression of the coding region of interest. Operably linked elements may be contiguous or non-contiguous. When used to refer to the joining of two protein coding regions, by operably linked is intended that the coding regions are in the same reading frame.

[0062] The promoter sequence can be constitutive, regulated, growth stage-specific, or tissue-specific. It is recognized that different applications can be enhanced by the use of different promoters in the nucleic acid molecules to modulate the timing, location and/or level of expression of the Cpf1 polypeptide and/or guide RNA. Such nucleic acid molecules may also contain, if desired, a promoter regulatory region (e.g., one conferring inducible, constitutive, environmentally- or developmentally-regulated, or cell- or tissue-specific/selective expression), a transcription initiation start site, a ribosome binding site, an RNA processing signal, a transcription termination site, and/or a polyadenylation signal.

[0063] In some embodiments, the nucleic acid molecules provided herein can be combined with constitutive, tissue-preferred, developmentally-preferred or other promoters for expression in plants. Examples of constitutive promoters functional in plant cells include the cauliflower mosaic virus (CaMV) 35S transcription initiation region, the 1′- or 2′-promoter derived from T-DNA of Agrobacterium tumefaciens, the ubiquitin 1 promoter, the Smas promoter, the cinnamyl alcohol dehydrogenase promoter (U.S. Pat. No. 5,683,439), the Nos promoter, the pEmu promoter, the rubisco promoter, the GRP1-8 promoter and other transcription initiation regions from various plant genes known to those of skill. If low level expression is desired, weak promoter(s) may be used. Weak constitutive promoters include, for example, the core promoter of the Rsyn7 promoter (WO 99/43838 and U.S. Pat. No. 6,072,050), the core 35S CaMV promoter, and the like. Other constitutive promoters include, for example, U.S. Pat. Nos. 5,608,149; 5,608,144; 5,604,121; 5,569,597; 5,466,785; 5,399,680; 5,268,463; and 5,608,142. See also, U.S. Pat. No. 6,177,611, herein incorporated by reference.

[0064] Examples of inducible promoters are the Adh1 promoter which is inducible by hypoxia or cold stress, the Hsp70 promoter which is inducible by heat stress, the PPDK promoter and the pepcarboxylase promoter which are both inducible by light. Also useful are promoters which are chemically inducible, such as the In2-2 promoter which is safener induced (U.S. Pat. No. 5,364,780), the ERE promoter which is estrogen induced, and the Axig1 promoter which is auxin induced and tapetum specific but also active in callus (PCT US01/22169).

[0065] Examples of promoters under developmental control in plants include promoters that initiate transcription preferentially in certain tissues, such as leaves, roots, fruit, seeds, or flowers. A “tissue specific” promoter is a promoter that initiates transcription only in certain tissues. Unlike constitutive expression of genes, tissue-specific expression is the result of several interacting levels of gene regulation. As such, promoters from homologous or closely related plant species can be preferable to use to achieve efficient and reliable expression of transgenes in particular tissues. In some embodiments, the expression comprises a tissue-preferred promoter. A “tissue preferred” promoter is a promoter that initiates transcription preferentially, but not necessarily entirely or solely in certain tissues.

[0066] In some embodiments, the nucleic acid molecules encoding a Cpf1 polypeptide and/or guide RNA comprise a cell type specific promoter. A “cell type specific” promoter is a promoter that primarily drives expression in certain cell types in one or more organs. Some examples of plant cells in which cell type specific promoters functional in plants may be primarily active include, for example, BETL cells, vascular cells in roots, leaves, stalk cells, and stem cells. The nucleic acid molecules can also include cell type preferred promoters. A “cell type preferred” promoter is a promoter that primarily drives expression mostly, but not necessarily entirely or solely in certain cell types in one or more organs. Some examples of plant cells in which cell type preferred promoters functional in plants may be preferentially active include, for example, BETL cells, vascular cells in roots, leaves, stalk cells, and stem cells. The nucleic acid molecules described herein can also comprise seed-preferred promoters. In some embodiments, the seed-preferred promoters have expression in embryo sac, early embryo, early endosperm, aleurone, and/or basal endosperm transfer cell layer (BETL).

[0067] Examples of seed-preferred promoters include, but are not limited to, 27 kD gamma zein promoter and waxy promoter, Boronat, A. et al. (1986) Plant Sci. 47:95-102; Reina, M. et al. Nucl. Acids Res. 18(21):6426; and Kloesgen, R. B. et al. (1986) Mol. Gen. Genet. 203:237-244. Promoters that express in the embryo, pericarp, and endosperm are disclosed in U.S. Pat. No. 6,225,529 and PCT publication WO 00/12733. The disclosures for each of these are incorporated herein by reference in their entirety.

[0068] Promoters that can drive gene expression in a plant seed-preferred manner with expression in the embryo sac, early embryo, early endosperm, aleurone and/or basal endosperm transfer cell layer (BETL) can be used in the compositions and methods disclosed herein. Such promoters include, but are not limited to, promoters that are naturally linked to Zea mays early endosperm 5 gene, Zea mays early endosperm 1 gene, Zea mays early endosperm 2 gene, GRMZM2G124663, GRMZM2G006585, GRMZM2G120008, GRMZM2G157806, GRMZM2G176390, GRMZM2G472234, GRMZM2G138727, Zea mays CLAVATA1, Zea mays MRP1, Oryza sativa PR602, Oryza sativa PR9a, Zea mays BET1, Zea mays BETL-2, Zea mays BETL-3, Zea mays BETL-4, Zea mays BETL-9, Zea mays BETL-10, Zea mays MEG1, Zea mays TCCR1, Zea mays ASP1, Oryza sativa ASP1, Triticum durum PR60, Triticum durum PR91, Triticum durum GL7, AT3G10590, AT4G18870, AT4G21080, AT5G23650, AT3G05860, AT5G42910, AT2G26320, AT3G03260, AT5G26630, AtIPT4, AtIPT8, AtLEC2, LFAH12. Additional such promoters are described in U.S. Pat. Nos. 7,803,990, 8,049,000, 7,745,697, 7,119,251, 7,964,770, 7,847,160, 7,700,836, U.S. Patent Application Publication Nos. 20100313301, 20090049571, 20090089897, 20100281569, 20100281570, 20120066795, 20040003427; PCT Publication Nos. WO/1999/050427, WO/2010/129999, WO/2009/094704, WO/2010/019996 and WO/2010/147825, each of which is herein incorporated by reference in its entirety for all purposes. Functional variants or functional fragments of the promoters described herein can also be operably linked to the nucleic acids disclosed herein.

[0069] Promoters that show preferential expression in meristematic cells may be desired in certain applications. Meristem-preferred promoters are disclosed in U.S. patent application Ser. Nos. 16/370,561 and 13/009,039, both of which are incorporated herein by reference.

[0070] Chemical-regulated promoters can be used to modulate the expression of a gene through the application of an exogenous chemical regulator. Depending upon the objective, the promoter may be a chemical-inducible promoter, where application of the chemical induces gene expression, or a chemical-repressible promoter, where application of the chemical represses gene expression. Chemical-inducible promoters are known in the art and include, but are not limited to, the maize In2-2 promoter, which is activated by benzenesulfonamide herbicide safeners, the maize GST promoter, which is activated by hydrophobic electrophilic compounds that are used as pre-emergent herbicides, and the tobacco PR-la promoter, which is activated by salicylic acid. Other chemical-regulated promoters of interest include steroid-responsive promoters (see, for example, the glucocorticoid-inducible promoter in Schena et al. (1991) Proc. Natl. Acad. Sci. USA 88:10421-10425 and McNellis et al. (1998) Plant J. 14(2):247-257) and tetracycline-inducible and tetracycline-repressible promoters (see, for example, Gatz et al. (1991) Mol. Gen. Genet. 227:229-237, and U.S. Pat. Nos. 5,814,618 and 5,789,156), herein incorporated by reference.

[0071] Tissue-preferred promoters can be utilized to target enhanced expression of an expression construct within a particular tissue. In certain embodiments, the tissue-preferred promoters may be active in plant tissue. Tissue-preferred promoters are known in the art. See, for example, Yamamoto et al. (1997) Plant J. 12(2):255-265; Kawamata et al. (1997) Plant Cell Physiol. 38(7):792-803; Hansen et al. (1997) Mol. Gen Genet. 254(3):337-343; Russell et al. (1997) Transgenic Res. 6(2):157-168; Rinehart et al. (1996) Plant Physiol. 112(3):1331-1341; Van Camp et al. (1996) Plant Physiol. 112(2):525-535; Canevascini et al. (1996) Plant Physiol. 112(2):513-524; Yamamoto et al. (1994) Plant Cell Physiol. 35(5):773-778; Lam (1994) Results Probl. Cell Differ. 20:181-196; Orozco et al. (1993) Plant Mol Biol. 23(6):1129-1138; Matsuoka et al. (1993) Proc Natl. Acad. Sci. USA 90(20):9586-9590; and Guevara-Garcia et al. (1993) Plant J. (3):495-505. Such promoters can be modified, if necessary, for weak expression.

[0072] Leaf-preferred promoters are known in the art. See, for example, Yamamoto et al. (1997) Plant 12(2):255-265; Kwon et al. (1994) Plant Physiol. 105:357-67; Yamamoto et al. (1994) Plant Cell Physiol. 35(5):773-778; Gotor et al. (1993) Plant J. 3:509-18; Orozco et al. (1993) Plant Mol. Biol. 23(6):1129-1138; and Matsuoka et al. (1993) Proc. Natl. Acad. Sci. USA 90(20):9586-9590. In addition, the promoters of cab and rubisco can also be used. See, for example, Simpson et al. (1958) EMBO J 4:2723-2729 and Timko et al. (1988) Nature 318:57-58.

[0073] Root-preferred promoters are known and can be selected from the many available from the literature or isolated de novo from various compatible species. See, for example, Hire et al. (1992) Plant Mol. Biol. 20(2):207-218 (soybean root-specific glutamine synthetase gene); Keller and Baumgartner (1991) Plant Cell 3(10):1051-1061 (root-specific control element in the GRP 1.8 gene of French bean); Sanger et al. (1990) Plant Mol. Biol. 14(3):433-443 (root-specific promoter of the mannopine synthase (MAS) gene of Agrobacterium tumefaciens); and Miao et al. (1991) Plant Cell 3(1):11-22 (full-length cDNA clone encoding cytosolic glutamine synthetase (GS), which is expressed in roots and root nodules of soybean). See also Bogusz et al. (1990) Plant Cell 2(7):633-641, where two root-specific promoters isolated from hemoglobin genes from the nitrogen-fixing nonlegume Parasponia andersonii and the related non-nitrogen-fixing nonlegume Trema tomentosa are described. The promoters of these genes were linked to a β-glucuronidase reporter gene and introduced into both the nonlegume Nicotiana tabacum and the legume Lotus corniculatus, and in both instances root-specific promoter activity was preserved. Leach and Aoyagi (1991) describe their analysis of the promoters of the highly expressed roIC and roID root-inducing genes of Agrobacterium rhizogenes (see Plant Science (Limerick) 79(1):69-76). They concluded that enhancer and tissue-preferred DNA determinants are dissociated in those promoters. Teeri et al. (1989) used gene fusion to lacZ to show that the Agrobacterium T-DNA gene encoding octopine synthase is especially active in the epidermis of the root tip and that the TR2′ gene is root specific in the intact plant and stimulated by wounding in leaf tissue, an especially desirable combination of characteristics for use with an insecticidal or larvicidal gene (see EMBO J. 8(2):343-350). The TR1′ gene, fused to nptII (neomycin phosphotransferase II) showed similar characteristics. Additional root-preferred promoters include the VfENOD-GRP3 gene promoter (Kuster et al. (1995) Plant Mol. Biol. 29(4):759-772); and roIB promoter (Capana et al. (1994) Plant Mol. Biol. 25(4):681-691. See also U.S. Pat. Nos. 5,837,876; 5,750,386; 5,633,363; 5,459,252; 5,401,836; 5,110,732; and 5,023,179. The phaseolin gene (Murai et al. (1983) Science 23:476-482 and Sengopta-Gopalen et al. (1988) PNAS 82:3320-3324. The promoter sequence can be wild type or it can be modified for more efficient or efficacious expression.

[0074] The nucleic acid sequences encoding the Cpf1 polypeptide or fusion protein can be operably linked to a promoter sequence that is recognized by a phage RNA polymerase for in vitro mRNA synthesis. In such embodiments, the in vitro-transcribed RNA can be purified for use in the methods of genome modification described herein. For example, the promoter sequence can be a T7, T3, or SP6 promoter sequence or a variation of a T7, T3, or SP6 promoter sequence. In some embodiments, the sequence encoding the Cpf1 polypeptide or fusion protein can be operably linked to a promoter sequence for in vitro expression of the Cpf1 polypeptide or fusion protein in plant cells. In such embodiments, the expressed protein can be purified for use in the methods of genome modification described herein.

[0075] In certain embodiments, the DNA encoding the Cpf1 polypeptide or fusion protein also can be linked to a polyadenylation signal (e.g., SV40 polyA signal and other signals functional in the cells of interest) and/or at least one transcriptional termination sequence. Additionally, the sequence encoding the Cpf1 polypeptide or fusion protein also can be linked to sequence encoding at least one nuclear localization signal, at least one plastid signal peptide, at least one mitochondrial signal peptide, at least one signal peptide capable of trafficking proteins to multiple subcellular locations, at least one cell-penetrating domain, and/or at least one marker domain, described elsewhere herein.

[0076] The DNA encoding the Cpf1 polypeptide or fusion protein can be present in a vector. Suitable vectors include plasmid vectors, phagemids, cosmids, artificial/mini-chromosomes, transposons, and viral vectors (e.g., lentiviral vectors, adeno-associated viral vectors, etc.). In one embodiment, the DNA encoding the Cpf1 polypeptide or fusion protein is present in a plasmid vector. Non-limiting examples of suitable plasmid vectors include pUC, pBR322, pET, pBluescript, pCAMBIA, and variants thereof. The vector can comprise additional expression control sequences (e.g., enhancer sequences, Kozak sequences, polyadenylation sequences, transcriptional termination sequences, etc.), selectable marker sequences (e.g., antibiotic resistance genes), origins of replication, and the like. Additional information can be found in “Current Protocols in Molecular Biology” Ausubel et al., John Wiley & Sons, New York, 2003 or “Molecular Cloning: A Laboratory Manual” Sambrook & Russell, Cold Spring Harbor Press, Cold Spring Harbor, N.Y., 3rd edition, 2001.

[0077] In some embodiments, the expression vector comprising the sequence encoding the Cpf1 polypeptide or fusion protein can further comprise a sequence encoding a guide RNA. The sequence encoding the guide RNA can be operably linked to at least one transcriptional control sequence for expression of the guide RNA in the plant or plant cell of interest. For example, DNA encoding the guide RNA can be operably linked to a promoter sequence that is recognized by RNA polymerase III (Pol III). Examples of suitable Pol III promoters include, but are not limited to, mammalian U6, U3, H1, and 7SL RNA promoters and rice U6 and U3 promoters.

### IV. Methods for Modifying a Nucleotide Sequence in a Genome

[0078] Methods are provided herein for modifying a nucleotide sequence of a genome. Non-limiting examples of genomes include cellular, nuclear, organellar, plasmid, and viral genomes. The methods comprise introducing into a genome host (e.g., a cell or organelle) one or more DNA-targeting polynucleotides such as a DNA-targeting RNA (“guide RNA,” “gRNA,” “CRISPR RNA,” or “crRNA”) or a DNA polynucleotide encoding a DNA-targeting RNA, wherein the DNA-targeting polynucleotide comprises: (a) a first segment comprising a nucleotide sequence that is complementary to a sequence in the target DNA; and (b) a second segment that interacts with a Cpf1 polypeptide and also introducing to the genome host a Cpf1 polypeptide, or a polynucleotide encoding a Cpf1 polypeptide, wherein the a Cpf1 polypeptide comprises: (a) a polynucleotide-binding portion that interacts with the gRNA or other DNA-targeting polynucleotide; and (b) an activity portion that exhibits site-directed enzymatic activity. The genome host can then be cultured under conditions in which the Cpf1 polypeptide is expressed and cleaves the nucleotide sequence that is targeted by the gRNA. It is noted that the system described herein does not require the addition of exogenous Mg′ or any other ions. Finally, a genome host comprising the modified nucleotide sequence can be selected.

[0079] The methods disclosed herein comprise introducing into a genome host at least one Cpf1 polypeptide or a nucleic acid encoding at least one Cpf1 polypeptide, as described herein. In some embodiments, the Cpf1 polypeptide can be introduced into the genome host as an isolated protein. In such embodiments, the Cpf1 polypeptide can further comprise at least one cell-penetrating domain, which facilitates cellular uptake of the protein. In some embodiments, the Cpf1 polypeptide can be introduced into the genome host as a nucleoprotein in complex with a guide polynucleotide (for instance, as a ribonucleoprotein in complex with a guide RNA). In other embodiments, the Cpf1 polypeptide can be introduced into the genome host as an mRNA molecule that encodes the Cpf1 polypeptide. In still other embodiments, the Cpf1 polypeptide can be introduced into the genome host as a DNA molecule comprising an open reading frame that encodes the Cpf1 polypeptide. In general, DNA sequences encoding the Cpf1 polypeptide or fusion protein described herein are operably linked to a promoter sequence that will function in the genome host. The DNA sequence can be linear, or the DNA sequence can be part of a vector. In still other embodiments, the Cpf1 polypeptide or fusion protein can be introduced into the genome host as an RNA-protein complex comprising the guide RNA or a fusion protein and the guide RNA.

[0080] In certain embodiments, mRNA encoding the Cpf1 polypeptide may be targeted to an organelle (e.g., plastid or mitochondria). In certain embodiments, mRNA encoding one or more guide RNAs may be targeted to an organelle (e.g., plastid or mitochondria). In certain embodiments, mRNA encoding the Cpf1 polypeptide and one or more guide RNAs may be targeted to an organelle (e.g., plastid or mitochondria). Methods for targeting mRNA to organelles are known in the art (see, e.g., U.S. Patent Application 2011/0296551; U.S. Patent Application 2011/0321187; Gomez and Pallas (2010) PLoS One 5:e12269), and are incorporated herein by reference.

[0081] In certain embodiments, DNA encoding the Cpf1 polypeptide can further comprise a sequence encoding a guide RNA. In general, each of the sequences encoding the Cpf1 polypeptide and the guide RNA is operably linked to one or more appropriate promoter control sequences that allow expression of the Cpf1 polypeptide and the guide RNA, respectively, in the genome host. The DNA sequence encoding the Cpf1 polypeptide and the guide RNA can further comprise additional expression control, regulatory, and/or processing sequence(s). The DNA sequence encoding the Cpf1 polypeptide and the guide RNA can be linear or can be part of a vector.

[0082] Methods described herein further can also comprise introducing into a genome host at least one guide polynucleotide such as a guide RNA or DNA encoding at least one guide RNA. A guide RNA interacts with the Cpf1 polypeptide to direct the Cpf1 polypeptide to a specific target site, at which site the 5′ end of the guide RNA base pairs with a specific protospacer sequence in the targeted nucleotide sequence. Guide RNAs can comprise three regions: a first region that is complementary to the target site in the targeted DNA sequence, a second region that forms a stem loop structure, and a third region that remains essentially single-stranded. The first region of each guide RNA is different such that each guide RNA guides a Cpf1 polypeptide to a specific target site. The second and third regions of each guide RNA can be the same in all guide RNAs.

[0083] One region of the guide RNA is complementary to a sequence (i.e., protospacer sequence) at the target site in the targeted DNA such that the first region of the guide RNA can base pair with the targeted site. In various embodiments, the first region of the guide RNA can comprise from about 8 nucleotides to more than about 30 nucleotides. For example, the region of base pairing between the first region of the guide RNA and the target site in the nucleotide sequence can be about 8, about 9, about 10, about 11, about 12, about 13, about 14, about 15, about 16, about 17, about 18, about 19, about 20, about 22, about 23, about 24, about 25, about 27, about 30 or more than 30 nucleotides in length. In an exemplary embodiment, the first region of the guide RNA is about 23, 24, or 25 nucleotides in length. The guide RNA also can comprise a second region that forms a secondary structure. In some embodiments, the secondary structure comprises a stem or hairpin. The length of the stem can vary. For example, the stem can range from about 6, to about 10, to about 15, to about 20, to about 25 base pairs in length. The stem can comprise one or more bulges of 1 to about 10 nucleotides. In some preferred embodiments, the hairpin structure comprises the sequence UCUACN3-5GUAGAU (SEQ ID NOs:15-17, encoded by SEQ ID NOs:12-14), with “UCUAC” and “GUAGA” base-pairing to form the stem. “N3-5” indicates 3, 4, or 5 nucleotides. Thus, the overall length of the second region can range from about 14 to about 25 nucleotides in length. In certain embodiments, the loop is about 3, 4, or 5 nucleotides in length and the stem comprises about 5, 6, 7, 8, 9, or 10 base pairs.

[0084] The guide RNA can also comprise a third region that remains essentially single-stranded. Thus, the third region has no complementarity to any nucleotide sequence in the cell of interest and has no complementarity to the rest of the guide RNA. The length of the third region can vary. In general, the third region is more than about 4 nucleotides in length. For example, the length of the third region can range from about 5 to about 60 nucleotides in length. The combined length of the second and third regions (also called the universal or scaffold region) of the guide RNA can range from about 30 to about 120 nucleotides in length. In one aspect, the combined length of the second and third regions of the guide RNA range from about 40 to about 45 nucleotides in length.

[0085] In some embodiments, the guide RNA comprises a single molecule comprising all three regions. In other embodiments, the guide RNA can comprise two separate molecules. The first RNA molecule can comprise the first region of the guide RNA and one half of the “stem” of the second region of the guide RNA. The second RNA molecule can comprise the other half of the “stem” of the second region of the guide RNA and the third region of the guide RNA. Thus, in this embodiment, the first and second RNA molecules each contain a sequence of nucleotides that are complementary to one another. For example, in one embodiment, the first and second RNA molecules each comprise a sequence (of about 6 to about 25 nucleotides) that base pairs to the other sequence to form a functional guide RNA. In specific embodiments, the guide RNA is a single molecule (i.e., crRNA) that interacts with the target site in the chromosome and the Cpf1 polypeptide without the need for a second guide RNA (i.e., a tracrRNA).

[0086] In certain embodiments, the guide RNA can be introduced into the genome host as an RNA molecule. The RNA molecule can be transcribed in vitro. Alternatively, the RNA molecule can be chemically synthesized. In other embodiments, the guide RNA can be introduced into the genome host as a DNA molecule. In such cases, the DNA encoding the guide RNA can be operably linked to one or more promoter control sequences for expression of the guide RNA in the genome host. For example, the RNA coding sequence can be operably linked to a promoter sequence that is recognized by RNA polymerase III (Pol III) or to a promoter sequence that is recognized by RNA polymerase II (Pol II).

[0087] The DNA molecule encoding the guide RNA can be linear or circular. In some embodiments, the DNA sequence encoding the guide RNA can be part of a vector. Suitable vectors include plasmid vectors, phagemids, cosmids, artificial/mini-chromosomes, transposons, and viral vectors. In an exemplary embodiment, the DNA encoding the guide RNA is present in a plasmid vector. Non-limiting examples of suitable plasmid vectors include pUC, pBR322, pET, pBluescript, pCAMBIA, and variants thereof. The vector can comprise additional expression control sequences (e.g., enhancer sequences, Kozak sequences, polyadenylation sequences, transcriptional termination sequences, etc.), selectable marker sequences (e.g., antibiotic resistance genes), origins of replication, and the like.

[0088] In embodiments in which both the Cpf1 polypeptide and the guide RNA are introduced into the genome host as DNA molecules, each can be part of a separate molecule (e.g., one vector containing Cpf1 polypeptide or fusion protein coding sequence and a second vector containing guide RNA coding sequence) or both can be part of the same molecule (e.g., one vector containing coding (and regulatory) sequence for both the Cpf1 polypeptide or fusion protein and the guide

[0089] RNA).

[0090] A Cpf1 polypeptide in conjunction with a guide RNA is directed to a target site in a genome host, wherein the Cpf1 polypeptide introduces a double-stranded break in the targeted DNA. The target site has no sequence limitation except that the sequence is immediately preceded (upstream) by a consensus sequence. This consensus sequence is also known as a protospacer adjacent motif (PAM). Examples of PAM sequences include, but are not limited to, TTTN, TTCN, GTTN, GTCN, GGCV, GGTV, TGTV, CTTV, TGCC, GCTC, GATC, TTGS, ATTS, CTCC, TAACK, and AGTGS (wherein N is defined as any nucleotide, V is defined as A, G, or C, S is defined as G or C, and K is defined as G or T). It is well-known in the art that a suitable PAM sequence must be located at the correct location relative to the targeted DNA sequence to allow the Cpf1 nuclease to produce the desired double-stranded break. For all Cpf1 nucleases characterized to date, the PAM sequence has been located immediately 5′ to the targeted DNA sequence. The PAM site requirements for a given Cpf1 nuclease cannot at present be predicted computationally, and instead must be determined experimentally using methods available in the art (Zetsche et al. (2015) Cell 163:759-771; Marshall et al. (2018) Mol Cell 69:146-157). It is well-known in the art that PAM sequence specificity for a given nuclease enzyme is affected by enzyme concentration (Karvelis et al. (2015) Genome Biol 16:253). Thus, modulating the concentrations of Cpf1 protein delivered to the cell or in vitro system of interest represents a way to alter the PAM site or sites associated with that Cpf1 enzyme. Modulating Cpf1 protein concentration in the system of interest may be achieved, for instance, by altering the promoter used to express the Cpf1-encoding gene, by altering the concentration of ribonucleoprotein delivered to the cell or in vitro system, or by adding or removing introns that may play a role in modulating gene expression levels. As detailed herein, the first region of the guide RNA is complementary to the protospacer of the target sequence. Typically, the first region of the guide RNA is about 19 to 21 nucleotides in length. In some embodiments, the first region of the guide RNA is about 17 to 24 nucleotides in length.

[0091] The target site can be in the coding region of a gene, in an intron of a gene, in a control region of a gene, in a non-coding region between genes, etc. The gene can be a protein coding gene or an RNA coding gene. The gene can be any gene of interest as described herein.

[0092] In some embodiments, the methods disclosed herein further comprise introducing at least one donor polynucleotide into a genome host. A donor polynucleotide comprises at least one donor sequence. In some aspects, a donor sequence of the donor polynucleotide corresponds to an endogenous or native sequence found in the targeted DNA. For example, the donor sequence can be essentially identical to a portion of the DNA sequence at or near the targeted site, but which comprises at least one nucleotide change. Thus, the donor sequence can comprise a modified version of the wild type sequence at the targeted site such that, upon integration or exchange with the native sequence, the sequence at the targeted location comprises at least one nucleotide change. For example, the change can be an insertion of one or more nucleotides, a deletion of one or more nucleotides, a substitution of one or more nucleotides, or combinations thereof. As a consequence of the integration of the modified sequence, the genome host can produce a modified gene product from the targeted chromosomal sequence.

[0093] The donor sequence of the donor polynucleotide can alternatively correspond to an exogenous sequence. As used herein, an “exogenous” sequence refers to a sequence that is not native to the genome host, or a sequence whose native location in the genome host is in a different location. For example, the exogenous sequence can comprise a protein coding sequence, which can be operably linked to an exogenous promoter control sequence such that, upon integration into the genome, the genome host is able to express the protein coded by the integrated sequence. For example, the donor sequence can be any gene of interest, such as those encoding agronomically important plant traits as described elsewhere herein. Alternatively, the exogenous sequence can be integrated into targeted DNA sequence such that its expression is regulated by an endogenous promoter control sequence. In other iterations, the exogenous sequence can be a transcriptional control sequence, another expression control sequence, or an RNA coding sequence. Integration of an exogenous sequence into a targeted DNA sequence is termed a “knock in.” The donor sequence can vary in length from several nucleotides to hundreds of nucleotides to hundreds of thousands of nucleotides.

[0094] In some embodiments, the donor sequence in the donor polynucleotide is flanked by an upstream sequence and a downstream sequence, which have substantial sequence identity to sequences located upstream and downstream, respectively, of the targeted site. Because of these sequence similarities, the upstream and downstream sequences of the donor polynucleotide permit homologous recombination between the donor polynucleotide and the targeted sequence such that the donor sequence can be integrated into (or exchanged with) the targeted DNA sequence.

[0095] The upstream sequence, as used herein, refers to a nucleic acid sequence that shares substantial sequence identity with a DNA sequence upstream of the targeted site. Similarly, the downstream sequence refers to a nucleic acid sequence that shares substantial sequence identity with a DNA sequence downstream of the targeted site. As used herein, the phrase “substantial sequence identity” refers to sequences having at least about 75% sequence identity. Thus, the upstream and downstream sequences in the donor polynucleotide can have about 75%, 76%, 77%, 78%, 79%, 80%, 81%, 82%, 83%, 84%, 85%, 86%, 87%, 88%, 89%, 90%, 91%, 92%, 93%, 94%, 95%, 96%, 97%, 98%, or 99% sequence identity with sequence upstream or downstream to the targeted site. In an exemplary embodiment, the upstream and downstream sequences in the donor polynucleotide can have about 95% or 100% sequence identity with nucleotide sequences upstream or downstream to the targeted site. In one embodiment, the upstream sequence shares substantial sequence identity with a nucleotide sequence located immediately upstream of the targeted site (i.e., adjacent to the targeted site). In other embodiments, the upstream sequence shares substantial sequence identity with a nucleotide sequence that is located within about one hundred (100) nucleotides upstream from the targeted site. Thus, for example, the upstream sequence can share substantial sequence identity with a nucleotide sequence that is located about 1 to about 20, about 21 to about 40, about 41 to about 60, about 61 to about 80, or about 81 to about 100 nucleotides upstream from the targeted site. In one embodiment, the downstream sequence shares substantial sequence identity with a nucleotide sequence located immediately downstream of the targeted site (i.e., adjacent to the targeted site). In other embodiments, the downstream sequence shares substantial sequence identity with a nucleotide sequence that is located within about one hundred (100) nucleotides downstream from the targeted site. Thus, for example, the downstream sequence can share substantial sequence identity with a nucleotide sequence that is located about 1 to about 20, about 21 to about 40, about 41 to about 60, about 61 to about 80, or about 81 to about 100 nucleotides downstream from the targeted site.

[0096] Each upstream or downstream sequence can range in length from about 20 nucleotides to about 5000 nucleotides. In some embodiments, upstream and downstream sequences can comprise about 50, 100, 200, 300, 400, 500, 600, 700, 800, 900, 1000, 1100, 1200, 1300, 1400, 1500, 1600, 1700, 1800, 1900, 2000, 2100, 2200, 2300, 2400, 2500, 2600, 2800, 3000, 3200, 3400, 3600, 3800, 4000, 4200, 4400, 4600, 4800, or 5000 nucleotides. In exemplary embodiments, upstream and downstream sequences can range in length from about 50 to about 1500 nucleotides.

[0097] Donor polynucleotides comprising the upstream and downstream sequences with sequence similarity to the targeted nucleotide sequence can be linear or circular. In embodiments in which the donor polynucleotide is circular, it can be part of a vector. For example, the vector can be a plasmid vector.

[0098] In certain embodiments, the donor polynucleotide can additionally comprise at least one targeted cleavage site that is recognized by the Cpf1 polypeptide. The targeted cleavage site added to the donor polynucleotide can be placed upstream or downstream or both upstream and downstream of the donor sequence. For example, the donor sequence can be flanked by targeted cleavage sites such that, upon cleavage by the Cpf1 polypeptide, the donor sequence is flanked by overhangs that are compatible with those in the nucleotide sequence generated upon cleavage by the Cpf1 polypeptide. Accordingly, the donor sequence can be ligated with the cleaved nucleotide sequence during repair of the double stranded break by a non-homologous repair process. Generally, donor polynucleotides comprising the targeted cleavage site(s) will be circular (e.g., can be part of a plasmid vector).

[0099] The donor polynucleotide can be a linear molecule comprising a short donor sequence with optional short overhangs that are compatible with the overhangs generated by the Cpf1 polypeptide. In such embodiments, the donor sequence can be ligated directly with the cleaved chromosomal sequence during repair of the double-stranded break. In some instances, the donor sequence can be less than about 1,000, less than about 500, less than about 250, or less than about 100 nucleotides. In certain cases, the donor polynucleotide can be a linear molecule comprising a short donor sequence with blunt ends. In other iterations, the donor polynucleotide can be a linear molecule comprising a short donor sequence with 5′ and/or 3′ overhangs. The overhangs can comprise 1, 2, 3, 4, or 5 nucleotides.

[0100] In some embodiments, the donor polynucleotide will be DNA. The DNA may be single-stranded or double-stranded and/or linear or circular. The donor polynucleotide may be a DNA plasmid, a bacterial artificial chromosome (BAC), a yeast artificial chromosome (YAC), a viral vector, a linear piece of DNA, a PCR fragment, a naked nucleic acid, or a nucleic acid complexed with a delivery vehicle such as a liposome or poloxamer. In certain embodiments, the donor polynucleotide comprising the donor sequence can be part of a plasmid vector. In any of these situations, the donor polynucleotide comprising the donor sequence can further comprise at least one additional sequence.

[0101] In some embodiments, the method can comprise introducing one Cpf1 polypeptide (or encoding nucleic acid) and one guide RNA (or encoding DNA) into a genome host, wherein the Cpf1 polypeptide introduces one double-stranded break in the targeted DNA. In embodiments in which an optional donor polynucleotide is not present, the double-stranded break in the nucleotide sequence can be repaired by a non-homologous end-joining (NHEJ) repair process. Because NHEJ is error-prone, deletions of at least one nucleotide, insertions of at least one nucleotide, substitutions of at least one nucleotide, or combinations thereof can occur during the repair of the break. Accordingly, the targeted nucleotide sequence can be modified or inactivated. For example, a single nucleotide change (SNP) can give rise to an altered protein product, or a shift in the reading frame of a coding sequence can inactivate or “knock out” the sequence such that no protein product is made. In embodiments in which the optional donor polynucleotide is present, the donor sequence in the donor polynucleotide can be exchanged with or integrated into the nucleotide sequence at the targeted site during repair of the double-stranded break. For example, in embodiments in which the donor sequence is flanked by upstream and downstream sequences having substantial sequence identity with upstream and downstream sequences, respectively, of the targeted site in the nucleotide sequence, the donor sequence can be exchanged with or integrated into the nucleotide sequence at the targeted site during repair mediated by homology-directed repair process. Alternatively, in embodiments in which the donor sequence is flanked by compatible overhangs (or the compatible overhangs are generated in situ by the Cpf1 polypeptide) the donor sequence can be ligated directly with the cleaved nucleotide sequence by a non-homologous repair process during repair of the double-stranded break. Exchange or integration of the donor sequence into the nucleotide sequence modifies the targeted nucleotide sequence or introduces an exogenous sequence into the targeted nucleotide sequence.

[0102] The methods disclosed herein can also comprise introducing one or more Cpf1 polypeptides (or encoding nucleic acids) and two guide polynucleotides (or encoding DNAs) into a genome host, wherein the Cpf1 polypeptides introduce two double-stranded breaks in the targeted nucleotide sequence. The two breaks can be within several base pairs, within tens of base pairs, or can be separated by many thousands of base pairs. In embodiments in which an optional donor polynucleotide is not present, the resultant double-stranded breaks can be repaired by a non-homologous repair process such that the sequence between the two cleavage sites is lost and/or deletions of at least one nucleotide, insertions of at least one nucleotide, substitutions of at least one nucleotide, or combinations thereof can occur during the repair of the break(s). In embodiments in which an optional donor polynucleotide is present, the donor sequence in the donor polynucleotide can be exchanged with or integrated into the targeted nucleotide sequence during repair of the double-stranded breaks by either a homology-based repair process (e.g., in embodiments in which the donor sequence is flanked by upstream and downstream sequences having substantial sequence identity with upstream and downstream sequences, respectively, of the targeted sites in the nucleotide sequence) or a non-homologous repair process (e.g., in embodiments in which the donor sequence is flanked by compatible overhangs).

### A. Methods for Modifying a Nucleotide Sequence in a Plant Genome

[0103] Plant cells possess nuclear, plastid, and mitochondrial genomes. The compositions and methods of the present invention may be used to modify the sequence of the nuclear, plastid, and/or mitochondrial genome, or may be used to modulate the expression of a gene or genes encoded by the nuclear, plastid, and/or mitochondrial genome. Accordingly, by “chromosome” or “chromosomal” is intended the nuclear, plastid, or mitochondrial genomic DNA. “Genome” as it applies to plant cells encompasses not only chromosomal DNA found within the nucleus, but organelle DNA found within subcellular components (e.g., mitochondria or plastids) of the cell. Any nucleotide sequence of interest in a plant cell, organelle, or embryo can be modified using the methods described herein. In specific embodiments, the methods disclosed herein are used to modify a nucleotide sequence encoding an agronomically important trait, such as a plant hormone, plant defense protein, a nutrient transport protein, a biotic association protein, a desirable input trait, a desirable output trait, a stress resistance gene, a disease/pathogen resistance gene, a male sterility, a developmental gene, a regulatory gene, a gene involved in photosynthesis, a DNA repair gene, a transcriptional regulatory gene or any other polynucleotide and/or polypeptide of interest. Agronomically important traits such as oil, starch, and protein content can also be modified. Modifications include increasing content of oleic acid, saturated and unsaturated oils, increasing levels of lysine and sulfur, providing essential amino acids, and also modification of starch. Hordothionin protein modifications are described in U.S. Pat. Nos. 5,703,049, 5,885,801, 5,885,802, and 5,990,389, herein incorporated by reference. Another example is lysine and/or sulfur rich seed protein encoded by the soybean 2S albumin described in U.S. Pat. No. 5,850,016, and the chymotrypsin inhibitor from barley, described in Williamson et al. (1987) Eur. J. Biochem. 165:99-106, the disclosures of which are herein incorporated by reference.

[0104] The Cpf1 polypeptide (or encoding nucleic acid), the guide RNA(s) (or encoding DNA), and the optional donor polynucleotide(s) can be introduced into a plant cell, organelle, or plant embryo by a variety of means, including transformation. Transformation protocols as well as protocols for introducing polypeptides or polynucleotide sequences into plants may vary depending on the type of plant or plant cell, i.e., monocot or dicot, targeted for transformation. Suitable methods of introducing polypeptides and polynucleotides into plant cells include microinjection (Crossway et al. (1986) Biotechniques 4:320-334), electroporation (Riggs et al. (1986) Proc. Natl. Acad. Sci. USA 83:5602-5606, Agrobacterium-mediated transformation (U.S. Pat. Nos. 5,563,055 and 5,981,840), direct gene transfer (Paszkowski et al. (1984) EMBO J. 3:2717-2722), and ballistic particle acceleration (see, for example, U.S. Pat. Nos. 4,945,050; 5,879,918; 5,886,244; and, 5,932,782; Tomes et al. (1995) in Plant Cell, Tissue, and Organ Culture: Fundamental Methods, ed. Gamborg and Phillips (Springer-Verlag, Berlin); McCabe et al. (1988) Biotechnology 6:923-926); and Lecl transformation (WO 00/28058). Also see Weissinger et al. (1988) Ann. Rev. Genet. 22:421-477; Sanford et al. (1987) Particulate Science and Technology 5:27-37 (onion); Christou et al. (1988) Plant Physiol. 87:671-674 (soybean); McCabe et al. (1988) Bio/Technology 6:923-926 (soybean); Finer and McMullen (1991) In Vitro Cell Dev. Biol. 27P:175-182 (soybean); Singh et al. (1998) Theor. Appl. Genet. 96:319-324 (soybean); Datta et al. (1990) Biotechnology 8:736-740 (rice); Klein et al. (1988) Proc. Natl. Acad. Sci. USA 85:4305-4309 (maize); Klein et al. (1988) Biotechnology 6:559-563 (maize); U.S. Pat. Nos. 5,240,855; 5,322,783; and, 5,324,646; Klein et al. (1988) Plant Physiol. 91:440-444 (maize); Fromm et al. (1990) Biotechnology 8:833-839 (maize); Hooykaas-Van Slogteren et al. (1984) Nature (London) 311:763-764; U.S. Pat. No. 5,736,369 (cereals); Bytebier et al. (1987) Proc. Natl. Acad. Sci. USA 84:5345-5349 (Liliaceae); De Wet et al. (1985) in The Experimental Manipulation of Ovule Tissues, ed. Chapman et al. (Longman, N.Y.), pp. 197-209 (pollen); Kaeppler et al. (1990) Plant Cell Reports 9:415-418 and Kaeppler et al. (1992) Theor. Appl. Genet. 84:560-566 (whisker-mediated transformation); D'Halluin et al. (1992) Plant Cell 4:1495-1505 (electroporation); Li et al. (1993) Plant Cell Reports 12:250-255 and Christou and Ford (1995) Annals of Botany 75:407-413 (rice); Osjoda et al. (1996) Nature Biotechnology 14:745-750 (maize via Agrobacterium tumefaciens); all of which are herein incorporated by reference. Site-specific genome editing of plant cells by biolistic introduction of a ribonucleoprotein comprising a nuclease and suitable guide RNA has been demonstrated (Svitashev et al (2016) Nat Commun doi: 10.1038/ncomms13274); these methods are herein incorporated by reference. “Stable transformation” is intended to mean that the nucleotide construct introduced into a plant integrates into the genome of the plant and is capable of being inherited by the progeny thereof. The nucleotide construct may be integrated into the nuclear, plastid, or mitochondrial genome of the plant. Methods for plastid transformation are known in the art (see, e.g., Chloroplast Biotechnology: Methods and Protocols (2014) Pal Maliga, ed. and U.S. Patent Application 2011/0321187), and methods for plant mitochondrial transformation have been described in the art (see, e.g., U.S. Patent Application 2011/0296551), herein incorporated by reference.

[0105] The cells that have been transformed may be grown into plants (i.e., cultured) in accordance with conventional ways. See, for example, McCormick et al. (1986) Plant Cell Reports 5:81-84. In this manner, the present invention provides transformed seed (also referred to as “transgenic seed”) having a nucleic acid modification stably incorporated into their genome.

[0106] “Introduced” in the context of inserting a nucleic acid fragment (e.g., a recombinant DNA construct) into a cell, means “transfection” or “transformation” or “transduction” and includes reference to the incorporation of a nucleic acid fragment into a plant cell where the nucleic acid fragment may be incorporated into the genome of the cell (e.g., nuclear chromosome, plasmid, plastid chromosome or mitochondrial chromosome), converted into an autonomous replicon, or transiently expressed (e.g., transfected mRNA).

[0107] The present invention may be used for transformation of any plant species, including, but not limited to, monocots and dicots (i.e., monocotyledonous and dicotyledonous, respectively). Examples of plant species of interest include, but are not limited to, corn (Zea mays), Brassica sp. (e.g., B. napus, B. rapa, B. juncea), particularly those Brassica species useful as sources of seed oil, alfalfa (Medicago sativa), rice (Oryza sativa), rye (Secale cereale), sorghum (Sorghum bicolor, Sorghum vulgare), camelina (Camelina sativa), millet (e.g., pearl millet (Pennisetum glaucum), proso millet (Panicum miliaceum), foxtail millet (Setaria italica), finger millet (Eleusine coracana)), sunflower (Helianthus annuus), quinoa (Chenopodium quinoa), chicory (Cichorium intybus), lettuce (Lactuca sativa), safflower (Carthamus tinctorius), wheat (Triticum aestivum), soybean (Glycine max), tobacco (Nicotiana tabacum), potato (Solanum tuberosum), tomato (Solanum lycopersicum), peanuts (Arachis hypogaea), cotton (Gossypium barbadense, Gossypium hirsutum), sweet potato (Ipomoea batatus), cassava (Manihot esculenta), coffee (Coffea spp.), coconut (Cocos nucifera), pineapple (Ananas comosus), citrus trees (Citrus spp.), cocoa (Theobroma cacao), tea (Camellia sinensis), banana (Musa spp.), avocado (Persea americana), fig (Ficus casica), guava (Psidium guajava), mango (Mangifera indica), olive (Olea europaea), papaya (Carica papaya), cashew (Anacardium occidentale), macadamia (Macadamia integrifolia), almond (Prunus amygdalus), sugar beets (Beta vulgaris), sugarcane (Saccharum spp.), oil palm (Elaeis guineensis), poplar (Populus spp.), pea (Pisum sativum), Eucalyptus (Eucalyptus spp.), oats (Avena sativa), barley (Hordeum vulgare), vegetables, ornamentals, and conifers.

[0108] The Cpf1 polypeptides (or encoding nucleic acid), the guide RNA(s) (or DNAs encoding the guide RNA), and the optional donor polynucleotide(s) can be introduced into the plant cell, organelle, or plant embryo simultaneously or sequentially. The ratio of the Cpf1 polypeptides (or encoding nucleic acid) to the guide RNA(s) (or encoding DNA) generally will be about stoichiometric such that the two components can form an RNA-protein complex with the target DNA. In one embodiment, DNA encoding a Cpf1 polypeptide and DNA encoding a guide RNA are delivered together within the plasmid vector.

[0109] The compositions and methods disclosed herein can be used to alter expression of genes of interest in a plant, such as genes involved in photosynthesis. Therefore, the expression of a gene encoding a protein involved in photosynthesis may be modulated as compared to a control plant. A “subject plant or plant cell” is one in which genetic alteration, such as a mutation, has been effected as to a gene of interest, or is a plant or plant cell which is descended from a plant or cell so altered and which comprises the alteration. A “control” or “control plant” or “control plant cell” provides a reference point for measuring changes in phenotype of the subject plant or plant cell. Thus, the expression levels are higher or lower than those in the control plant depending on the methods of the invention.

[0110] A control plant or plant cell may comprise, for example: (a) a wild-type plant or cell, i.e., of the same genotype as the starting material for the genetic alteration which resulted in the subject plant or cell; (b) a plant or plant cell of the same genotype as the starting material but which has been transformed with a null construct (i.e. with a construct which has no known effect on the trait of interest, such as a construct comprising a marker gene); (c) a plant or plant cell which is a non-transformed segregant among progeny of a subject plant or plant cell; (d) a plant or plant cell genetically identical to the subject plant or plant cell but which is not exposed to conditions or stimuli that would induce expression of the gene of interest; or (e) the subject plant or plant cell itself, under conditions in which the gene of interest is not expressed.

[0111] While the invention is described in terms of transformed plants, it is recognized that transformed organisms of the invention also include plant cells, plant protoplasts, plant cell tissue cultures from which plants can be regenerated, plant calli, plant clumps, and plant cells that are intact in plants or parts of plants such as embryos, pollen, ovules, seeds, leaves, flowers, branches, fruit, kernels, ears, cobs, husks, stalks, roots, root tips, anthers, and the like. Grain is intended to mean the mature seed produced by commercial growers for purposes other than growing or reproducing the species. Progeny, variants, and mutants of the regenerated plants are also included within the scope of the invention, provided that these parts comprise the introduced polynucleotides.

[0112] Derivatives of coding sequences can be made using the methods disclosed herein to increase the level of preselected amino acids in the encoded polypeptide. For example, the gene encoding the barley high lysine polypeptide (BHL) is derived from barley chymotrypsin inhibitor, U.S. application Ser. No. 08/740,682, filed Nov. 1, 1996, and WO 98/20133, the disclosures of which are herein incorporated by reference. Other proteins include methionine-rich plant proteins such as from sunflower seed (Lilley et al. (1989) Proceedings of the World Congress on Vegetable Protein Utilization in Human Foods and Animal Feedstuffs, ed. Applewhite (American Oil Chemists Society, Champaign, Ill.), pp. 497-502; herein incorporated by reference); corn (Pedersen et al. (1986) J. Biol. Chem. 261:6279; Kirihara et al. (1988) Gene 71:359; both of which are herein incorporated by reference); and rice (Musumura et al. (1989) Plant Mol. Biol. 12:123, herein incorporated by reference). Other agronomically important genes encode latex, Floury 2, growth factors, seed storage factors, and transcription factors.

[0113] The methods disclosed herein can be used to modify herbicide resistance traits including genes coding for resistance to herbicides that act to inhibit the action of acetolactate synthase (ALS), in particular the sulfonylurea-type herbicides (e.g., the acetolactate synthase (ALS) gene containing mutations leading to such resistance, in particular the S4 and/or Hra mutations), genes coding for resistance to herbicides that act to inhibit action of glutamine synthase, such as phosphinothricin or basta (e.g., the bar gene); glyphosate (e.g., the EPSPS gene and the GAT gene; see, for example, U.S. Publication No. 20040082770 and WO 03/092360); or other such genes known in the art. The bar gene encodes resistance to the herbicide basta, the nptII gene encodes resistance to the antibiotics kanamycin and geneticin, and the ALS-gene mutants encode resistance to the herbicide chlorsulfuron. Additional herbicide resistance traits are described for example in U.S. Patent Application 2016/0208243, herein incorporated by reference.

[0114] Sterility genes can also be modified and provide an alternative to physical detasseling. Examples of genes used in such ways include male tissue-preferred genes and genes with male sterility phenotypes such as QM, described in U.S. Pat. No. 5,583,210. Other genes include kinases and those encoding compounds toxic to either male or female gametophytic development. Additional sterility traits are described for example in U.S. Patent Application 2016/0208243, herein incorporated by reference.

[0115] The quality of grain can be altered by modifying genes encoding traits such as levels and types of oils, saturated and unsaturated, quality and quantity of essential amino acids, and levels of cellulose. In corn, modified hordothionin proteins are described in U.S. Pat. Nos. 5,703,049, 5,885,801, 5,885,802, and 5,990,389.

[0116] Commercial traits can also be altered by modifying a gene or that could increase for example, starch for ethanol production, or provide expression of proteins. Another important commercial use of modified plants is the production of polymers and bioplastics such as described in U.S. Pat. No. 5,602,321. Genes such as β-Ketothiolase, PHBase (polyhydroxyburyrate synthase), and acetoacetyl-CoA reductase (see Schubert et al. (1988) J. Bacterial. 170:5837-5847) facilitate expression of polyhyroxyalkanoates (PHAs).

[0117] Exogenous products include plant enzymes and products as well as those from other sources including prokaryotes and other eukaryotes. Such products include enzymes, cofactors, hormones, and the like. The level of proteins, particularly modified proteins having improved amino acid distribution to improve the nutrient value of the plant, can be increased. This is achieved by the expression of such proteins having enhanced amino acid content.

[0118] The methods disclosed herein can also be used for insertion of heterologous genes and/or modification of native plant gene expression to achieve desirable plant traits. Such traits include, for example, disease resistance, herbicide tolerance, drought tolerance, salt tolerance, insect resistance, resistance against parasitic weeds, improved plant nutritional value, improved forage digestibility, increased grain yield, cytoplasmic male sterility, altered fruit ripening, increased storage life of plants or plant parts, reduced allergen production, and increased or decreased lignin content. Genes capable of conferring these desirable traits are disclosed in U.S. Patent Application 2016/0208243, herein incorporated by reference.

### B. Methods for Modifying a Nucleotide Sequence in a Non-Plant Eukaryotic Genome

[0119] Methods are provided herein for modifying a nucleotide sequence of a non-plant eukaryotic cell, or non-plant eukaryotic organelle. In some embodiments, the non-plant eukaryotic cell is a mammalian cell. In particular embodiments, the non-plant eukaryotic cell is a non-human mammalian cell. The methods comprise introducing into a target cell or organelle a DNA-targeting RNA or a DNA polynucleotide encoding a DNA-targeting RNA, wherein the DNA-targeting RNA comprises: (a) a first segment comprising a nucleotide sequence that is complementary to a sequence in the target DNA; and (b) a second segment that interacts with a Cpf1 polypeptide and also introducing to the target cell or organelle a Cpf1 polypeptide, or a polynucleotide encoding a Cpf1 polypeptide, wherein the Cpf1 polypeptide comprises: (a) an RNA-binding portion that interacts with the DNA-targeting RNA; and (b) an activity portion that exhibits site-directed enzymatic activity. The target cell or organelle can then be cultured under conditions in which the chimeric nuclease polypeptide is expressed and cleaves the nucleotide sequence. It is noted that the system described herein does not require the addition of exogenous Mg′ or any other ions. Finally, a non-plant eukaryotic cell or organelle comprising the modified nucleotide sequence can be selected.

[0120] In some embodiments, the method can comprise introducing one Cpf1 polypeptide (or encoding nucleic acid) and one guide RNA (or encoding DNA) into a non-plant eukaryotic cell or organelle wherein the Cpf1 polypeptide introduces one double-stranded break in the target nucleotide sequence of the nuclear or organellar chromosomal DNA. In some embodiments, the method can comprise introducing one Cpf1 polypeptide (or encoding nucleic acid) and at least one guide RNA (or encoding DNA) into a non-plant eukaryotic cell or organelle wherein the Cpf1 polypeptide introduces more than one double-stranded break (i.e., two, three, or more than three double-stranded breaks) in the target nucleotide sequence of the nuclear or organellar chromosomal DNA. In embodiments in which an optional donor polynucleotide is not present, the double-stranded break in the nucleotide sequence can be repaired by a non-homologous end-joining (NHEJ) repair process. Because NHEJ is error-prone, deletions of at least one nucleotide, insertions of at least one nucleotide, substitutions of at least one nucleotide, or combinations thereof can occur during the repair of the break. Accordingly, the targeted nucleotide sequence can be modified or inactivated. For example, a single nucleotide change (SNP) can give rise to an altered protein product, or a shift in the reading frame of a coding sequence can inactivate or “knock out” the sequence such that no protein product is made. In embodiments in which the optional donor polynucleotide is present, the donor sequence in the donor polynucleotide can be exchanged with or integrated into the nucleotide sequence at the targeted site during repair of the double-stranded break. For example, in embodiments in which the donor sequence is flanked by upstream and downstream sequences having substantial sequence identity with upstream and downstream sequences, respectively, of the targeted site in the nucleotide sequence of the non-plant eukaryotic cell or organelle, the donor sequence can be exchanged with or integrated into the nucleotide sequence at the targeted site during repair mediated by homology-directed repair process. Alternatively, in embodiments in which the donor sequence is flanked by compatible overhangs (or the compatible overhangs are generated in situ by the Cpf1 polypeptide) the donor sequence can be ligated directly with the cleaved nucleotide sequence by a non-homologous repair process during repair of the double-stranded break. Exchange or integration of the donor sequence into the nucleotide sequence modifies the targeted nucleotide sequence or introduces an exogenous sequence into the targeted nucleotide sequence of the non-plant eukaryotic cell or organelle.

[0121] In some embodiments, the double-stranded breaks caused by the action of the Cpf1 nuclease or nucleases are repaired in such a way that DNA is deleted from the chromosome of the non-plant eukaryotic cell or organelle. In some embodiments one base, a few bases (i.e., 2, 3, 4, 5, 6, 7, 8, 9, or 10 bases), or a large section of DNA (i.e., more than 10, more than 50, more than 100, or more than 500 bases) is deleted from the chromosome of the non-plant eukaryotic cell or organelle.

[0122] In some embodiments, the expression of non-plant eukaryotic genes may be modulated as a result of the double-stranded breaks caused by the Cpf1 nuclease or nucleases. In some embodiments, the expression of non-plant eukaryotic genes may be modulated by variant Cpf1 enzymes comprising a mutation that renders the Cpf1 nuclease incapable of producing a double-stranded break. In some preferred embodiments, the variant Cpf1 nuclease comprising a mutation that renders the Cpf1 nuclease incapable of producing a double-stranded break may be fused to a transcriptional activation or transcriptional repression domain.

[0123] In some embodiments, a eukaryotic cell comprising mutations in its nuclear and/or organellar chromosomal DNA caused by the action of a Cpf1 nuclease or nucleases is cultured to produce a eukaryotic organism. In some embodiments, a eukaryotic cell in which gene expression is modulated as a result of one or more Cpf1 nucleases, or one or more variant Cpf1 nucleases, is cultured to produce a eukaryotic organism. Methods for culturing non-plant eukaryotic cells to produce eukaryotic organisms are known in the art, for instance in U.S. Patent Applications 2016/0208243 and 2016/0138008, herein incorporated by reference.

[0124] The present invention may be used for transformation of any eukaryotic species, including, but not limited to animals (including but not limited to mammals, insects, fish, birds, and reptiles), fungi, amoeba, and yeast.

[0125] Methods for the introduction of nuclease proteins, DNA or RNA molecules encoding nuclease proteins, guide RNAs or DNA molecules encoding guide RNAs, and optional donor sequence DNA molecules into non-plant eukaryotic cells or organelles are known in the art, for instance in U.S. Patent Application 2016/0208243, herein incorporated by reference. Exemplary genetic modifications to non-plant eukaryotic cells or organelles that may be of particular value for industrial applications are also known in the art, for instance in U.S. Patent Application 2016/0208243, herein incorporated by reference.

### C. Methods for Modifying a Nucleotide Sequence in a Prokaryotic Genome

[0126] Methods are provided herein for modifying a nucleotide sequence of a prokaryotic (e.g., bacterial or archaeal) cell. The methods comprise introducing into a target cell a DNA-targeting RNA or a DNA polynucleotide encoding a DNA-targeting RNA, wherein the DNA-targeting RNA comprises: (a) a first segment comprising a nucleotide sequence that is complementary to a sequence in the target DNA; and (b) a second segment that interacts with a Cpf1 polypeptide and also introducing to the target cell a Cpf1 polypeptide, or a polynucleotide encoding a Cpf1 polypeptide, wherein the Cpf1 polypeptide comprises: (a) an RNA-binding portion that interacts with the DNA-targeting RNA; and (b) an activity portion that exhibits site-directed enzymatic activity. The target cell can then be cultured under conditions in which the Cpf1 polypeptide is expressed and cleaves the nucleotide sequence. It is noted that the system described herein does not require the addition of exogenous Mg′ or any other ions. Finally, prokaryotic cells comprising the modified nucleotide sequence can be selected. It is further noted that he prokaryotic cells comprising the modified nucleotide sequence or sequences are not the natural host cells of the polynucleotides encoding the Cpf1 polypeptide of interest, and that a non-naturally occurring guide RNA is used to effect the desired changes in the prokaryotic nucleotide sequence or sequences. It is further noted that the targeted DNA may be present as part of the prokaryotic chromosome(s) or may be present on one or more plasmids or other non-chromosomal DNA molecules in the prokaryotic cell.

[0127] In some embodiments, the method can comprise introducing one Cpf1 polypeptide (or encoding nucleic acid) and one guide RNA (or encoding DNA) into a prokaryotic cell wherein the Cpf1 polypeptide introduces one double-stranded break in the target nucleotide sequence of the prokaryotic cellular DNA. In some embodiments, the method can comprise introducing one Cpf1 polypeptide (or encoding nucleic acid) and at least one guide RNA (or encoding DNA) into a prokaryotic cell wherein the Cpf1 polypeptide introduces more than one double-stranded break (i.e., two, three, or more than three double-stranded breaks) in the target nucleotide sequence of the prokaryotic cellular DNA. In embodiments in which an optional donor polynucleotide is not present, the double-stranded break in the nucleotide sequence can be repaired by a non-homologous end-joining (NHEJ) repair process. Because NHEJ is error-prone, deletions of at least one nucleotide, insertions of at least one nucleotide, substitutions of at least one nucleotide, or combinations thereof can occur during the repair of the break. Accordingly, the targeted nucleotide sequence can be modified or inactivated. For example, a single nucleotide change (SNP) can give rise to an altered protein product, or a shift in the reading frame of a coding sequence can inactivate or “knock out” the sequence such that no protein product is made. In embodiments in which the optional donor polynucleotide is present, the donor sequence in the donor polynucleotide can be exchanged with or integrated into the nucleotide sequence at the targeted site during repair of the double-stranded break. For example, in embodiments in which the donor sequence is flanked by upstream and downstream sequences having substantial sequence identity with upstream and downstream sequences, respectively, of the targeted site in the nucleotide sequence of the prokaryotic cell, the donor sequence can be exchanged with or integrated into the nucleotide sequence at the targeted site during repair mediated by homology-directed repair process. Alternatively, in embodiments in which the donor sequence is flanked by compatible overhangs (or the compatible overhangs are generated in situ by the Cpf1 polypeptide) the donor sequence can be ligated directly with the cleaved nucleotide sequence by a non-homologous repair process during repair of the double-stranded break. Exchange or integration of the donor sequence into the nucleotide sequence modifies the targeted nucleotide sequence or introduces an exogenous sequence into the targeted nucleotide sequence of the prokaryotic cellular DNA.

[0128] In some embodiments, the double-stranded breaks caused by the action of the Cpf1 nuclease or nucleases are repaired in such a way that DNA is deleted from the prokaryotic cellular DNA. In some embodiments one base, a few bases (i.e., 2, 3, 4, 5, 6, 7, 8, 9, or 10 bases), or a large section of DNA (i.e., more than 10, more than 50, more than 100, or more than 500 bases) is deleted from the prokaryotic cellular DNA.

[0129] In some embodiments, the double-stranded breaks caused by the action of the Cpf1 nuclease or nucleases are not effectively repaired, leading to cell death in those cells where Cpf1 produced a double-stranded break. In such embodiments, cells that comprise the sequence or sequences targeted by the Cpf1 nuclease or nucleases will be selected against.

[0130] In some embodiments, the expression of prokaryotic genes may be modulated as a result of the double-stranded breaks caused by the Cpf1 nuclease or nucleases. In some embodiments, the expression of prokaryotic genes may be modulated by variant Cpf1 nucleases comprising a mutation that renders the Cpf1 nuclease incapable of producing a double-stranded break, or by fusion proteins comprising Cpf1 nucleases or variant Cpf1 nucleases. In some preferred embodiments, the variant Cpf1 nuclease comprising a mutation that renders the Cpf1 nuclease incapable of producing a double-stranded break may be fused to a transcriptional activation or transcriptional repression domain.

[0131] The present invention may be used for transformation of any prokaryotic species, including, but not limited to, cyanobacteria, Corynebacterium sp., Bifidobacterium sp., Mycobacterium sp., Streptomyces sp., Thermobifida sp., Chlamydia sp., Prochlorococcus sp., Synechococcus sp., Thermosynechococcus sp., Thermus sp., Bacillus sp., Clostridium sp., Geobacillus sp., Lactobacillus sp., Listeria sp., Staphylococcus sp., Streptococcus sp., Fusobacterium sp., Agrobacterium sp., Bradyrhizobium sp., Ehrlichia sp., Mesorhizobium sp., Nitrobacter sp., Rickettsia sp., Wolbachia sp., Zymomonas sp., Burkholderia sp., Neisseria sp., Ralstonia sp., Acinetobacter sp., Envinia sp., Escherichia sp., Haemophilus sp., Legionella sp., Pasteurella sp., Pseudomonas sp., Psychrobacter sp., Salmonella sp., Shewanella sp., Shigella sp., Vibrio sp., Xanthomonas sp., Xylella sp., Yersinia sp., Campylobacter sp., Desulfovibrio sp., Helicobacter sp., Geobacter sp., Leptospira sp., Treponema sp., Mycoplasma sp., and Thermotoga sp.

[0132] Methods for the introduction of nuclease proteins, DNA or RNA molecules encoding nuclease proteins, guide RNAs or DNA molecules encoding guide RNAs, and optional donor sequence DNA molecules into prokaryotic cells or organelles are known in the art, for instance in U.S. Patent Application 2016/0208243, herein incorporated by reference. Exemplary genetic modifications to prokaryotic cells that may be of particular value for industrial applications are also known in the art, for instance in U.S. Patent Application 2016/0208243, herein incorporated by reference.

### D. Methods for Modifying a Nucleotide Sequence in a Viral Genome

[0133] Methods are provided herein for modifying a nucleotide sequence of a viral genome. The methods comprise introducing into a cell that comprises a virus of interest a DNA-targeting RNA or a DNA polynucleotide encoding a DNA-targeting RNA, wherein the DNA-targeting RNA comprises: (a) a first segment comprising a nucleotide sequence that is complementary to a sequence in the target DNA; and (b) a second segment that interacts with a Cpf1 polypeptide and also introducing to the target cell a Cpf1 polypeptide, or a polynucleotide encoding a Cpf1 polypeptide, wherein the Cpf1 polypeptide comprises: (a) an RNA-binding portion that interacts with the DNA-targeting RNA; and (b) an activity portion that exhibits site-directed enzymatic activity. The target cell comprising the virus of interest can then be cultured under conditions in which the Cpf1 polypeptide is expressed and cleaves the viral nucleotide sequence. Alternatively, the viral genome may be manipulated in vitro, wherein the guide polynucleotide, Cpf1 polypeptide, and optional donor polynucleotide are incubated with a viral DNA sequence of interest outside of a cellular host.

### V. Methods for Modulating Gene Expression

[0134] The methods disclosed herein further encompass modification of a nucleotide sequence or regulating expression of a nucleotide sequence in a genome host. The methods can comprise introducing into the genome host at least one fusion protein or nucleic acid encoding at least one fusion protein, wherein the fusion protein comprises a Cpf1 polypeptide or a fragment or variant thereof and an effector domain, and (b) at least one guide RNA or DNA encoding the guide RNA, wherein the guide RNA guides the Cpf1 polypeptide of the fusion protein to a target site in the targeted DNA and the effector domain of the fusion protein modifies the chromosomal sequence or regulates expression of one or more genes in near the targeted DNA sequence.

[0135] Fusion proteins comprising a Cpf1 polypeptide or a fragment or variant thereof and an effector domain are described herein. In general, the fusion proteins disclosed herein can further comprise at least one nuclear localization signal, plastid signal peptide, mitochondrial signal peptide, or signal peptide capable of trafficking proteins to multiple subcellular locations. Nucleic acids encoding fusion proteins are described herein. In some embodiments, the fusion protein can be introduced into the genome host as an isolated protein (which can further comprise a cell-penetrating domain). Furthermore, the isolated fusion protein can be part of a protein-RNA complex comprising the guide RNA. In other embodiments, the fusion protein can be introduced into the genome host as a RNA molecule (which can be capped and/or polyadenylated). In still other embodiments, the fusion protein can be introduced into the genome host as a DNA molecule. For example, the fusion protein and the guide RNA can be introduced into the genome host as discrete DNA molecules or as part of the same DNA molecule. Such DNA molecules can be plasmid vectors.

[0136] In some embodiments, the method further comprises introducing into the genome host at least one donor polynucleotide as described elsewhere herein. Means for introducing molecules into genome hosts such as cells, as well as means for culturing cells (including cells comprising organelles) are described herein.

[0137] In certain embodiments in which the effector domain of the fusion protein is a cleavage domain, the method can comprise introducing into the genome host one fusion protein (or nucleic acid encoding one fusion protein) and two guide RNAs (or DNA encoding two guide RNAs). The two guide RNAs direct the fusion protein to two different target sites in the chromosomal sequence, wherein the fusion protein dimerizes (e.g., forms a homodimer) such that the two cleavage domains can introduce a double stranded break into the targeted DNA sequence. In embodiments in which the optional donor polynucleotide is not present, the double-stranded break in the targeted DNA sequence can be repaired by a non-homologous end-joining (NHEJ) repair process. Because NHEJ is error-prone, deletions of at least one nucleotide, insertions of at least one nucleotide, substitutions of at least one nucleotide, or combinations thereof can occur during the repair of the break. Accordingly, the targeted chromosomal sequence can be modified or inactivated. For example, a single nucleotide change (SNP) can give rise to an altered protein product, or a shift in the reading frame of a coding sequence can inactivate or “knock out” the sequence such that no protein product is made. In embodiments in which the optional donor polynucleotide is present, the donor sequence in the donor polynucleotide can be exchanged with or integrated into the targeted DNA sequence at the targeted site during repair of the double-stranded break. For example, in embodiments in which the donor sequence is flanked by upstream and downstream sequences having substantial sequence identity with upstream and downstream sequences, respectively, of the targeted site in the targeted DNA sequence, the donor sequence can be exchanged with or integrated into the targeted DNA sequence at the targeted site during repair mediated by homology-directed repair process. Alternatively, in embodiments in which the donor sequence is flanked by compatible overhangs (or the compatible overhangs are generated in situ by the Cpf1 polypeptide) the donor sequence can be ligated directly with the cleaved targeted DNA sequence by a non-homologous repair process during repair of the double-stranded break. Exchange or integration of the donor sequence into the targeted DNA sequence modifies the targeted DNA sequence or introduces an exogenous sequence into the targeted DNA sequence.

[0138] In other embodiments in which the effector domain of the fusion protein is a cleavage domain, the method can comprise introducing into the genome host two different fusion proteins (or nucleic acid encoding two different fusion proteins) and two guide RNAs (or DNA encoding two guide RNAs). The fusion proteins can differ as detailed elsewhere herein. Each guide RNA directs a fusion protein to a specific target site in the targeted DNA sequence, wherein the fusion proteins can dimerize (e.g., form a heterodimer) such that the two cleavage domains can introduce a double stranded break into the targeted DNA sequence. In embodiments in which the optional donor polynucleotide is not present, the resultant double-stranded breaks can be repaired by a non-homologous repair process such that deletions of at least one nucleotide, insertions of at least one nucleotide, substitutions of at least one nucleotide, or combinations thereof can occur during the repair of the break. In embodiments in which the optional donor polynucleotide is present, the donor sequence in the donor polynucleotide can be exchanged with or integrated into the chromosomal sequence during repair of the double-stranded break by either a homology-based repair process (e.g., in embodiments in which the donor sequence is flanked by upstream and downstream sequences having substantial sequence identity with upstream and downstream sequences, respectively, of the targeted sites in the chromosomal sequence) or a non-homologous repair process (e.g., in embodiments in which the donor sequence is flanked by compatible overhangs).

[0139] In certain embodiments in which the effector domain of the fusion protein is a transcriptional activation domain or a transcriptional repressor domain, the method can comprise introducing into the genome host one fusion protein (or nucleic acid encoding one fusion protein) and one guide RNA (or DNA encoding one guide RNA). The guide RNA directs the fusion protein to a specific targeted DNA sequence, wherein the transcriptional activation domain or a transcriptional repressor domain activates or represses expression, respectively, of a gene or genes located near the targeted DNA sequence. That is, transcription may be affected for genes in close proximity to the targeted DNA sequence or may be affected for genes located at further distance from the targeted DNA sequence. It is well-known in the art that gene transcription can be regulated by distantly located sequences that may be located thousands of bases away from the transcription start site or even on a separate chromosome (Harmston and Lenhard (2013) Nucleic Acids Res 41:7185-7199).

[0140] In alternate embodiments in which the effector domain of the fusion protein is an epigenetic modification domain, the method can comprise introducing into the genome host one fusion protein (or nucleic acid encoding one fusion protein) and one guide RNA (or DNA encoding one guide RNA). The guide RNA directs the fusion protein to a specific targeted DNA sequence, wherein the epigenetic modification domain modifies the structure of the targeted DNA sequence. Epigenetic modifications include acetylation, methylation of histone proteins and/or nucleotide methylation. In some instances, structural modification of the chromosomal sequence leads to changes in expression of the chromosomal sequence.

### VI. Organisms Comprising a Genetic Modification

[0141] A. Eukaryotes

[0142] Provided herein are eukaryotes, eukaryotic cells, organelles, and plant embryos comprising at least one nucleotide sequence that has been modified using a Cpf1 polypeptide-mediated or fusion protein-mediated process as described herein. Also provided are eukaryotes, eukaryotic cells, organelles, and plant embryos comprising at least one DNA or RNA molecule encoding Cpf1 polypeptide or fusion protein targeted to a chromosomal sequence of interest or a fusion protein, at least one guide RNA, and optionally one or more donor polynucleotide(s). The genetically modified eukaryotes disclosed herein can be heterozygous for the modified nucleotide sequence or homozygous for the modified nucleotide sequence. Eukaryotic cells comprising one or more genetic modifications in organellar DNA may be heteroplasmic or homoplasmic.

[0143] The modified chromosomal sequence of the eukaryotes, eukaryotic cells, organelles, and plant embryos may be modified such that it is inactivated, has up-regulated or down-regulated expression, or produces an altered protein product, or comprises an integrated sequence. The modified chromosomal sequence may be inactivated such that the sequence is not transcribed and/or a functional protein product is not produced. Thus, a genetically modified eukaryote comprising an inactivated chromosomal sequence may be termed a “knock out” or a “conditional knock out.” The inactivated chromosomal sequence can include a deletion mutation (i.e., deletion of one or more nucleotides), an insertion mutation (i.e., insertion of one or more nucleotides), or a nonsense mutation (i.e., substitution of a single nucleotide for another nucleotide such that a stop codon is introduced). As a consequence of the mutation, the targeted chromosomal sequence is inactivated and a functional protein is not produced. The inactivated chromosomal sequence comprises no exogenously introduced sequence. Also included herein are genetically modified eukaryotes in which two, three, four, five, six, seven, eight, nine, or ten or more chromosomal sequences are inactivated.

[0144] The modified chromosomal sequence can also be altered such that it codes for a variant protein product. For example, a genetically modified eukaryote comprising a modified chromosomal sequence can comprise a targeted point mutation(s) or other modification such that an altered protein product is produced. In one embodiment, the chromosomal sequence can be modified such that at least one nucleotide is changed and the expressed protein comprises one changed amino acid residue (missense mutation). In another embodiment, the chromosomal sequence can be modified to comprise more than one missense mutation such that more than one amino acid is changed. Additionally, the chromosomal sequence can be modified to have a three nucleotide deletion or insertion such that the expressed protein comprises a single amino acid deletion or insertion. Alternatively, the chromosomal sequence can be modified to have a deletion or insertion of a number of base pairs that is a multiple of three (e.g., three, six, nine, twelve, fifteen, etc.), such that the expressed protein comprises an insertion or deletion of two, three, four, five, or more amino acids. The altered or variant protein can have altered properties or activities compared to the wild type protein, such as altered substrate specificity, altered enzyme activity, altered kinetic rates, etc.

[0145] In some embodiments, the genetically modified eukaryote can comprise at least one chromosomally integrated nucleotide sequence. A genetically modified eukaryote comprising an integrated sequence may be termed a “knock in” or a “conditional knock in.” The nucleotide sequence that is integrated sequence can, for example, encode an orthologous protein, an endogenous protein, or combinations of both. In one embodiment, a sequence encoding an orthologous protein or an endogenous protein can be integrated into a nuclear or organellar chromosomal sequence encoding a protein such that the chromosomal sequence is inactivated, but the exogenous sequence is expressed. In such a case, the sequence encoding the orthologous protein or endogenous protein may be operably linked to a promoter control sequence. Alternatively, a sequence encoding an orthologous protein or an endogenous protein may be integrated into a nuclear or organellar chromosomal sequence without affecting expression of a chromosomal sequence. For example, a sequence encoding a protein can be integrated into a “safe harbor” locus. The present disclosure also encompasses genetically modified eukaryotes in which two, three, four, five, six, seven, eight, nine, or ten or more sequences, including sequences encoding protein(s), are integrated into the genome. Any gene of interest as disclosed herein can be introduced integrated into the chromosomal sequence of the eukaryotic nucleus or organelle. In particular embodiments, genes that increase plant growth or yield are integrated into the chromosome.

The chromosomally integrated sequence encoding a protein can encode the wild type form of a protein of interest or can encode a protein comprising at least one modification such that an altered version of the protein is produced. For example, a chromosomally integrated sequence encoding a protein related to a disease or disorder can comprise at least one modification such that the altered version of the protein produced causes or potentiates the associated disorder. Alternatively, the chromosomally integrated sequence encoding a protein related to a disease or disorder can comprise at least one modification such that the altered version of the protein protects the eukaryote or eukaryotic cell against the development of the associated disease or disorder.

[0146] In certain embodiments, the genetically modified eukaryote can comprise at least one modified chromosomal sequence encoding a protein such that the expression pattern of the protein is altered. For example, regulatory regions controlling the expression of the protein, such as a promoter or a transcription factor binding site, can be altered such that the protein is over-expressed, or the tissue-specific or temporal expression of the protein is altered, or a combination thereof. Alternatively, the expression pattern of the protein can be altered using a conditional knockout system. A non-limiting example of a conditional knockout system includes a Cre-lox recombination system. A Cre-lox recombination system comprises a Cre recombinase enzyme, a site-specific DNA recombinase that can catalyze the recombination of a nucleic acid sequence between specific sites (lox sites) in a nucleic acid molecule. Methods of using this system to produce temporal and tissue specific expression are known in the art.

[0147] B. Prokaryotes

[0148] Provided herein are prokaryotes and prokaryotic cells comprising at least one nucleotide sequence that has been modified using a Cpf1 polypeptide-mediated or fusion protein-mediated process as described herein. Also provided are prokaryotes and prokaryotic cells comprising at least one DNA or RNA molecule encoding Cpf1 polypeptide or fusion protein targeted to a DNA sequence of interest or a fusion protein, at least one guide RNA, and optionally one or more donor polynucleotide(s).

[0149] The modified DNA sequence of the prokaryotes and prokaryotic cells may be modified such that it is inactivated, has up-regulated or down-regulated expression, or produces an altered protein product, or comprises an integrated sequence. The modified DNA sequence may be inactivated such that the sequence is not transcribed and/or a functional protein product is not produced. Thus, a genetically modified prokaryote comprising an inactivated chromosomal sequence may be termed a “knock out” or a “conditional knock out.” The inactivated DNA sequence can include a deletion mutation (i.e., deletion of one or more nucleotides), an insertion mutation (i.e., insertion of one or more nucleotides), or a nonsense mutation (i.e., substitution of a single nucleotide for another nucleotide such that a stop codon is introduced). As a consequence of the mutation, the targeted DNA sequence is inactivated and a functional protein is not produced. The inactivated DNA sequence comprises no exogenously introduced sequence. Also included herein are genetically modified prokaryotes in which two, three, four, five, six, seven, eight, nine, or ten or more DNA sequences are inactivated.

[0150] The modified DNA sequence can also be altered such that it codes for a variant protein product. For example, a genetically modified prokaryote comprising a modified DNA sequence can comprise a targeted point mutation(s) or other modification such that an altered protein product is produced. In one embodiment, the DNA sequence can be modified such that at least one nucleotide is changed and the expressed protein comprises one changed amino acid residue (missense mutation). In another embodiment, the DNA sequence can be modified to comprise more than one missense mutation such that more than one amino acid is changed. Additionally, the DNA sequence can be modified to have a three nucleotide deletion or insertion such that the expressed protein comprises a single amino acid deletion or insertion. Alternatively, the DNA sequence can be modified to have an insertion or deletion of a number of bases that is a multiple of three (e.g., 3, 6, 9, 12, 15, etc.) such that the expressed protein comprises a deletion or insertion of one, two, three, four, five, or more amino acids. The altered or variant protein can have altered properties or activities compared to the wild type protein, such as altered substrate specificity, altered enzyme activity, altered kinetic rates, etc.

[0151] In some embodiments, the genetically modified prokaryote can comprise at least one integrated nucleotide sequence. A genetically modified prokaryote comprising an integrated sequence may be termed a “knock in” or a “conditional knock in.” The nucleotide sequence that is integrated sequence can, for example, encode an orthologous protein, an endogenous protein, or combinations of both. In one embodiment, a sequence encoding an orthologous protein or an endogenous protein can be integrated into a prokaryotic DNA sequence encoding a protein such that the prokaryotic sequence is inactivated, but the exogenous sequence is expressed. In such a case, the sequence encoding the orthologous protein or endogenous protein may be operably linked to a promoter control sequence. Alternatively, a sequence encoding an orthologous protein or an endogenous protein may be integrated into a prokaryotic DNA sequence without affecting expression of a native prokaryotic sequence. For example, a sequence encoding a protein can be integrated into a “safe harbor” locus. The present disclosure also encompasses genetically modified prokaryotes in which two, three, four, five, six, seven, eight, nine, or ten or more sequences, including sequences encoding protein(s), are integrated into the prokaryotic genome or plasmids hosted by the prokaryote. Any gene of interest as disclosed herein can be introduced integrated into the DNA sequence of the prokaryotic chromosome, plasmid, or other extrachromosomal DNA.

[0152] The integrated sequence encoding a protein can encode the wild type form of a protein of interest or can encode a protein comprising at least one modification such that an altered version of the protein is produced. For example, an integrated sequence encoding a protein related to a disease or disorder can comprise at least one modification such that the altered version of the protein produced causes or potentiates the associated disorder. Alternatively, the integrated sequence encoding a protein related to a disease or disorder can comprise at least one modification such that the altered version of the protein reduces the infectivity of the prokaryote.

[0153] In certain embodiments, the genetically modified prokaryote can comprise at least one modified DNA sequence encoding a protein such that the expression pattern of the protein is altered. For example, regulatory regions controlling the expression of the protein, such as a promoter or a transcription factor binding site, can be altered such that the protein is over-expressed, or the temporal expression of the protein is altered, or a combination thereof. Alternatively, the expression pattern of the protein can be altered using a conditional knockout system. A non-limiting example of a conditional knockout system includes a Cre-lox recombination system. A Cre-lox recombination system comprises a Cre recombinase enzyme, a site-specific DNA recombinase that can catalyze the recombination of a nucleic acid sequence between specific sites (lox sites) in a nucleic acid molecule. Methods of using this system to produce temporal expression are known in the art.

[0154] C. Viruses

[0155] Provided herein are viruses and viral genomes comprising at least one nucleotide sequence that has been modified using a Cpf1 polypeptide-mediated or fusion protein-mediated process as described herein. Also provided are viruses and viral genomes comprising at least one DNA or RNA molecule encoding Cpf1 polypeptide or fusion protein targeted to a DNA sequence of interest or a fusion protein, at least one guide RNA, and optionally one or more donor polynucleotide(s).

[0156] The modified DNA sequence of the viruses and viral genomes may be modified such that it is inactivated, has up-regulated or down-regulated expression, or produces an altered protein product, or comprises an integrated sequence. The modified DNA sequence may be inactivated such that the sequence is not transcribed and/or a functional protein product is not produced. Thus, a genetically modified virus comprising an inactivated chromosomal sequence may be termed a “knock out” or a “conditional knock out.” The inactivated DNA sequence can include a deletion mutation (i.e., deletion of one or more nucleotides), an insertion mutation (i.e., insertion of one or more nucleotides), or a nonsense mutation (i.e., substitution of a single nucleotide for another nucleotide such that a stop codon is introduced). As a consequence of the mutation, the targeted DNA sequence is inactivated and a functional protein is not produced. The inactivated DNA sequence comprises no exogenously introduced sequence. Also included herein are genetically modified viruses in which two, three, four, five, six, seven, eight, nine, or ten or more viral sequences are inactivated.

[0157] The modified DNA sequence can also be altered such that it codes for a variant protein product. For example, a genetically modified virus comprising a modified DNA sequence can comprise a targeted point mutation(s) or other modification such that an altered protein product is produced. In one embodiment, the DNA sequence can be modified such that at least one nucleotide is changed and the expressed protein comprises one changed amino acid residue (missense mutation). In another embodiment, the DNA sequence can be modified to comprise more than one missense mutation such that more than one amino acid is changed. Additionally, the DNA sequence can be modified to have a three nucleotide deletion or insertion such that the expressed protein comprises a single amino acid deletion or insertion. The altered or variant protein can have altered properties or activities compared to the wild type protein, such as altered substrate specificity, altered enzyme activity, altered kinetic rates, etc.

[0158] In some embodiments, the genetically modified virus can comprise at least one integrated nucleotide sequence. A genetically modified virus comprising an integrated sequence may be termed a “knock in” or a “conditional knock in.” The nucleotide sequence that is integrated sequence can, for example, encode an orthologous protein, an endogenous protein, or combinations of both. In one embodiment, a sequence encoding an orthologous protein or an endogenous protein can be integrated into a viral DNA sequence encoding a protein such that the viral sequence is inactivated, but the exogenous sequence is expressed. In such a case, the sequence encoding the orthologous protein or endogenous protein may be operably linked to a promoter control sequence. Alternatively, a sequence encoding an orthologous protein or an endogenous protein may be integrated into a viral DNA sequence without affecting expression of a native viral sequence. For example, a sequence encoding a protein can be integrated into a “safe harbor” locus. The present disclosure also encompasses genetically modified viruses in which two, three, four, five, six, seven, eight, nine, or ten or more sequences, including sequences encoding protein(s), are integrated into the viral genome. Any gene of interest as disclosed herein can be introduced integrated into the DNA sequence of the viral genome.

[0159] The integrated sequence encoding a protein can encode the wild type form of a protein of interest or can encode a protein comprising at least one modification such that an altered version of the protein is produced. For example, an integrated sequence encoding a protein related to a disease or disorder can comprise at least one modification such that the altered version of the protein produced causes or potentiates the associated disorder. Alternatively, the integrated sequence encoding a protein related to a disease or disorder can comprise at least one modification such that the altered version of the protein reduces the infectivity of the virus.

[0160] In certain embodiments, the genetically modified virus can comprise at least one modified DNA sequence encoding a protein such that the expression pattern of the protein is altered. For example, regulatory regions controlling the expression of the protein, such as a promoter or a transcription factor binding site, can be altered such that the protein is over-expressed, or the temporal expression of the protein is altered, or a combination thereof. Alternatively, the expression pattern of the protein can be altered using a conditional knockout system. A non-limiting example of a conditional knockout system includes a Cre-lox recombination system. A Cre-lox recombination system comprises a Cre recombinase enzyme, a site-specific DNA recombinase that can catalyze the recombination of a nucleic acid sequence between specific sites (lox sites) in a nucleic acid molecule. Methods of using this system to produce temporal expression are known in the art.

[0161] All publications and patent applications mentioned in the specification are indicative of the level of skill of those skilled in the art to which this invention pertains. All publications and patent applications are herein incorporated by reference to the same extent as if each individual publication or patent application was specifically and individually indicated to be incorporated by reference.

[0162] Although the foregoing invention has been described in some detail by way of illustration and example for purposes of clarity of understanding, it will be obvious that certain changes and modifications may be practiced within the scope of the appended claims.

Embodiments of the invention include:
1. A method of modifying a nucleotide sequence at a target site in the genome of a eukaryotic cell comprising:

[0163] introducing into said eukaryotic cell
[0164] (i) a DNA-targeting RNA, or a DNA polynucleotide encoding a DNA-targeting RNA, wherein the DNA-targeting RNA comprises: (a) a first segment comprising a nucleotide sequence that is complementary to a targeted sequence in the genome of said eukaryotic cell; and (b) a second segment that interacts with a Cpf1 polypeptide; and
[0165] (ii) a Cpf1 polypeptide having at least 80% identity with one or more polypeptide sequences selected from the group consisting of SEQ ID NOs: 9-11 and 36-38; or a polynucleotide encoding a Cpf1 polypeptide wherein said polynucleotide encoding a Cpf1 polypeptide has at least 70% identity with one or more nucleic acid sequences selected from the group consisting of SEQ ID NOs: 25 and 27; wherein the Cpf1 polypeptide comprises: (a) an RNA-binding portion that interacts with the DNA-targeting RNA; and (b) an activity portion that exhibits site-directed enzymatic activity, wherein the Cpf1 polypeptide comprises an arginine at the position corresponding to D172 in SEQ ID NO:3, wherein said targeted sequence is located immediately 3′ of a PAM site in the genome of said eukaryotic cell, wherein said Cpf1 polypeptide recognizes a TTTC PAM site, and wherein said genome of a eukaryotic cell is a nuclear, plastid, or mitochondrial genome.
   2. A method of modifying a nucleotide sequence at a target site in the genome of a prokaryotic cell comprising:

[0166] introducing into said prokaryotic cell
[0167] (i) a DNA-targeting RNA, or a DNA polynucleotide encoding a DNA-targeting RNA, wherein the DNA-targeting RNA comprises: (a) a first segment comprising a nucleotide sequence that is complementary to a targeted sequence in the genome of said prokaryotic cell; and (b) a second segment that interacts with a Cpf1 polypeptide; and
[0168] (ii) a Cpf1 polypeptide having at least 80% identity with one or more polypeptide sequences selected from the group consisting of SEQ ID NOs: 9-11 and 36-38; or a polynucleotide encoding a Cpf1 polypeptide wherein said polynucleotide encoding a Cpf1 polypeptide has at least 70% identity with one or more nucleic acid sequences selected from the group consisting of SEQ ID NOs: 25 and 27; wherein the Cpf1 polypeptide comprises: (a) an RNA-binding portion that interacts with the DNA-targeting RNA; and (b) an activity portion that exhibits site-directed enzymatic activity,
   wherein the Cpf1 polypeptide comprises an arginine at the position corresponding to D172 in SEQ ID NO:3, wherein said genome of a prokaryotic cell is a chromosomal, plasmid, or other intracellular DNA sequence, wherein said targeted sequence is located immediately 3′ of a PAM site in the genome of said prokaryotic cell, wherein said Cpf1 polypeptide recognizes a TTTC PAM site, and wherein said prokaryotic cell is not the native host of a gene encoding said Cpf1 polypeptide.
   3. A method of modifying a nucleotide sequence at a target site in the genome of a plant cell comprising:

[0169] introducing into said plant cell
[0170] (i) a DNA-targeting RNA, or a DNA polynucleotide encoding a DNA-targeting RNA, wherein the DNA-targeting RNA comprises: (a) a first segment comprising a nucleotide sequence that is complementary to a targeted sequence in the genome of said plant cell; and (b) a second segment that interacts with a Cpf1 polypeptide; and
[0171] (ii) a Cpf1 polypeptide having at least 80% identity with one or more polypeptide sequences selected from the group consisting of SEQ ID NOs: 9-11 and 36-38; or a polynucleotide encoding a Cpf1 polypeptide wherein said polynucleotide encoding a Cpf1 polypeptide has at least 70% identity with one or more nucleic acid sequences selected from the group consisting of SEQ ID NOs: 25 and 27; wherein the Cpf1 polypeptide comprises: (a) an RNA-binding portion that interacts with the DNA-targeting RNA; and (b) an activity portion that exhibits site-directed enzymatic activity,
   wherein the Cpf1 polypeptide comprises an arginine at the position corresponding to D172 in SEQ ID NO:3, wherein said targeted sequence is located immediately 3′ of a PAM site in the genome of said plant cell, wherein said Cpf1 polypeptide recognizes a TTTC PAM site, and wherein said genome of a plant cell is a nuclear, plastid, or mitochondrial genome.
   4. A method of modifying a nucleotide sequence at a target site in the genome of a virus comprising:

[0172] introducing into a prokaryotic cell that is the host of said virus
[0173] (i) a DNA-targeting RNA, or a DNA polynucleotide encoding a DNA-targeting RNA, wherein the DNA-targeting RNA comprises: (a) a first segment comprising a nucleotide sequence that is complementary to a targeted sequence in the genome of said virus; and (b) a second segment that interacts with a Cpf1 polypeptide; and
[0174] (ii) a Cpf1 polypeptide having at least 80% identity with one or more polypeptide sequences selected from the group consisting of SEQ ID NOs: 9-11 and 36-38; or a polynucleotide encoding a Cpf1 polypeptide wherein said polynucleotide encoding a Cpf1 polypeptide has at least 70% identity with one or more nucleic acid sequences selected from the group consisting of SEQ ID NOs: 25 and 27; wherein the Cpf1 polypeptide comprises: (a) an RNA-binding portion that interacts with the DNA-targeting RNA; and (b) an activity portion that exhibits site-directed enzymatic activity,
   wherein the Cpf1 polypeptide comprises an arginine at the position corresponding to D172 in SEQ ID NO:3, wherein said targeted sequence is located immediately 3′ of a PAM site in the genome of said prokaryotic cell, wherein said Cpf1 polypeptide recognizes a TTTC PAM site, and wherein said prokaryotic cell is not the native host of a gene encoding said Cpf1 polypeptide.
   5. The method of any one of embodiments 1 and 3, further comprising:

[0175] culturing the plant under conditions in which the Cpf1 polypeptide is expressed and cleaves the nucleotide sequence at the target site to produce a modified nucleotide sequence; and

[0176] selecting a plant comprising said modified nucleotide sequence.

6. The method of any one of embodiments 1-5, wherein cleaving of the nucleotide sequence at the target site comprises a double strand break at or near the sequence to which the DNA-targeting RNA sequence is targeted.
7. The method of embodiment 6, wherein said double strand break is a staggered double strand break.
8. The method of embodiment 7, wherein said staggered double strand break creates a 5′ overhang of 3-6 nucleotides.
9. The method of any one of embodiments 1-8, wherein said DNA-targeting RNA is a guide RNA (gRNA), and wherein said guide RNA comprises the sequence UCUACN3-5GUAGAU (SEQ ID NOs:15-17, encoded by SEQ ID NOs:12-14).
10. The method of any one of embodiments 1-9, wherein said modified nucleotide sequence comprises insertion of heterologous DNA into the genome of the cell, deletion of a nucleotide sequence from the genome of the cell, or mutation of at least one nucleotide in the genome of the cell.
11. The method of any one of embodiments 1-10, wherein said Cpf1 polypeptide comprises a sequence selected from the group consisting of: SEQ ID NOs: 9-11 and 36-38.
12. The method of any one of embodiments 1-11, wherein said polynucleotide encoding a Cpf1 polypeptide is selected from the group consisting of SEQ ID NOs: 25 and 27.
13. The method of embodiment 1, wherein said eukaryotic cell is a mammalian cell.
14. The method of embodiment 1, wherein said eukaryotic cell is a yeast cell.
15. The method of embodiment 1, wherein said eukaryotic cell is a fungal cell.
16. The method of embodiment 1, wherein said eukaryotic cell is an insect cell.
17. The method of embodiment 1, wherein said eukaryotic cell is an algal cell.
18. The method of embodiment 2, wherein said prokaryotic cell is a bacterial cell.
19. The method of embodiment 2, wherein said prokaryotic cell is an archaeal cell.
20. The method of any one of embodiments 3 and 5, wherein said plant cell is from a monocotyledonous species.
21. The method of any one of embodiments 3 and 5, wherein said plant cell is from a dicotyledonous species.
22. The method of any one of embodiments 1-22, wherein the expression of the Cpf1 polypeptide is under the control of an inducible or constitutive promoter.
23. The method of any one of embodiments 1-23, wherein the expression of the Cpf1 polypeptide is under the control of a cell type-specific or developmentally-preferred promoter.
24. The method of any one of embodiments 1-24, wherein the PAM sequence comprises a sequence selected from the group consisting of TTTN, TTTV, YTTN, and YTTV.
25. The method of any one of embodiments 3 and 5, wherein said nucleotide sequence at a target site in the genome of a cell encodes an SBPase, FBPase, FBP aldolase, AGPase large subunit, AGPase small subunit, sucrose phosphate synthase, starch synthase, PEP carboxylase, pyruvate phosphate dikinase, transketolase, rubisco small subunit, or rubisco activase protein, or encodes a transcription factor that regulates the expression of one or more genes encoding an SBPase, FBPase, FBP aldolase, AGPase large subunit, AGPase small subunit, sucrose phosphate synthase, starch synthase, PEP carboxylase, pyruvate phosphate dikinase, transketolase, rubisco small subunit, or rubisco activase protein.
26. The method of any one of embodiments 1-25, the method further comprising contacting the target site with a donor polynucleotide, wherein the donor polynucleotide, a portion of the donor polynucleotide, a copy of the donor polynucleotide, or a portion of a copy of the donor polynucleotide integrates into the target DNA.
27. The method of any one of embodiments 1-26, wherein the target DNA is modified such that nucleotides within the target DNA are deleted.
28. The method of any one of embodiments 1-27, wherein said polynucleotide encoding a Cpf1 polypeptide is codon optimized for expression in a plant cell.
29. The method of any one of embodiments 1-28, wherein the expression of said nucleotide sequence is increased or decreased.
30. The method of any one of embodiments 1-29, wherein the polynucleotide encoding a Cpf1 polypeptide is operably linked to a promoter that is constitutive, cell specific, inducible, or activated by alternative splicing of a suicide exon.
31. The method of any one of embodiments 1-30, wherein said Cpf1 polypeptide comprises one or more mutations that reduce or eliminate the nuclease activity of said Cpf1 polypeptide.
32. The method of embodiment 31, wherein said mutated Cpf1 polypeptide comprises a mutation in a position corresponding to positions 877 or 971 of SEQ ID NO:3 when aligned for maximum identity.
33. The method of embodiment 32, wherein said mutations in positions corresponding to positions 877 or 971 of SEQ ID NO:3 are D877A and E971A, respectively.
34. The method of any one of embodiments 31-33, wherein said mutated Cpf1 polypeptide comprises an amino acid sequence that shares at least 95% identity with an amino acid sequence selected from the group consisting of SEQ ID NOs: 9-11 and 36-38, wherein said mutated Cpf1 polypeptide retains the mutations in positions corresponding to positions 877 or 971 of SEQ ID NO:3.
35. The method of any one of embodiments 31-34, wherein the mutated Cpf1 polypeptide is fused to a transcriptional activation domain.
36. The method of embodiment 35, wherein the mutated Cpf1 polypeptide is directly fused to a transcriptional activation domain or fused to a transcriptional activation domain with a linker.
37. The method of any one of embodiments 31-34, wherein the mutated Cpf1 polypeptide is fused to a transcriptional repressor domain.
38. The method of embodiment 37, wherein the mutated Cpf1 polypeptide is fused to a transcriptional repressor domain with a linker.
39. The method of any one of embodiments 1-38 wherein said Cpf1 polypeptide further comprises a nuclear localization signal.
40. The method of embodiment 39 wherein said nuclear localization signal comprises SEQ ID NO:1, or is encoded by SEQ ID NO:2.
41. The method of any one of embodiments 1-38 wherein said Cpf1 polypeptide further comprises a chloroplast signal peptide.
42. The method of any one of embodiments 1-38 wherein said Cpf1 polypeptide further comprises a mitochondrial signal peptide.
43. The method of any one of embodiments 1-38 wherein said Cpf1 polypeptide further comprises a signal peptide that targets said Cpf1 polypeptide to multiple subcellular locations.
44. A composition comprising a polynucleotide sequence encoding a Cpf1 polypeptide wherein said polynucleotide sequence shares at least 70% sequence identity with a polynucleotide sequence selected from the group consisting of: SEQ ID NOs: 4, 6, 8, and 24-27, or wherein said polynucleotide sequence encodes a Cpf1 polypeptide that has at least 80% sequence identity to a polypeptide selected from the group consisting of SEQ ID NOs: 25 and 27, wherein the Cpf1 polypeptide comprises an arginine at the position corresponding to D172 in SEQ ID NO:3, and wherein said polynucleotide sequence has been codon optimized for expression in a plant cell.
45. A composition comprising a polynucleotide sequence encoding a Cpf1 polypeptide wherein said polynucleotide sequence shares at least 70% sequence identity with a polynucleotide sequence selected from the group consisting of: SEQ ID NOs: 25 and 27, or wherein said polynucleotide sequence encodes a Cpf1 polypeptide that shares at least 80% sequence identity with a polypeptide selected from the group consisting of SEQ ID NOs: 9-11 and 36-38, wherein said polynucleotide sequence has been codon optimized for expression in a eukaryotic cell.
46. A composition comprising a polynucleotide sequence encoding a Cpf1 polypeptide wherein said polynucleotide sequence shares at least 70% sequence identity with a polynucleotide sequence selected from the group consisting of: SEQ ID NOs: 25 and 27, or wherein said polynucleotide sequence encodes a Cpf1 polypeptide that shares at least 80% sequence identity with a polypeptide selected from the group consisting of SEQ ID NOs: 9-11 and 36-38, wherein the Cpf1 polypeptide comprises an arginine at the position corresponding to D172 in SEQ ID NO:3, and wherein said polynucleotide sequence has been codon optimized for expression in a prokaryotic cell.
47. The nucleic acid molecule of any one of embodiments 44-46, wherein said polynucleotide sequence is selected from the group consisting of: SEQ ID NOs: 25 and 27, or wherein said polynucleotide sequence encodes a Cpf1 polypeptide selected from the group consisting of SEQ ID NOs: 9-11 and 36-38, wherein the Cpf1 polypeptide comprises an arginine at the position corresponding to D172 in SEQ ID NO:3.
48. The nucleic acid molecule of any one of embodiments 44-46, wherein said polynucleotide sequence encoding a Cpf1 polypeptide is operably linked to a promoter that is heterologous to the polynucleotide sequence encoding a Cpf1 polypeptide.
49. The nucleic acid molecule of any one of embodiments 44-46, wherein said Cpf1 polypeptide comprises an amino acid sequence selected from the group consisting of: SEQ ID NOs: 9-11 and 36-38, or a fragment or variant thereof.
50. The nucleic acid molecule of any one of embodiments 44-49, wherein said polynucleotide sequence encoding a Cpf1 polypeptide is operably linked to a promoter that is active in a mammalian cell.
51. The nucleic acid molecule of any one of embodiments 44-49, wherein said polynucleotide sequence encoding a Cpf1 polypeptide is operably linked to a promoter that is active in a plant cell.
52. The nucleic acid molecule of any one of embodiments 44-49, wherein said polynucleotide sequence encoding a Cpf1 polypeptide is operably linked to a promoter that is active in a eukaryotic cell.
53. The nucleic acid molecule of any one of embodiments 44-49, wherein said polynucleotide sequence encoding a Cpf1 polypeptide is operably linked to a promoter that is active in a prokaryotic cell.
54. The nucleic acid molecule of any one of embodiments 44-49, wherein said polynucleotide sequence encoding a Cpf1 polypeptide is operably linked to a constitutive promoter, inducible promoter, cell type-specific promoter, or developmentally-preferred promoter.
55. The nucleic acid molecule of any one of embodiments 44-49, wherein said nucleic acid molecule encodes a fusion protein comprising said Cpf1 polypeptide and an effector domain.
56. The nucleic acid molecule of embodiment 55, wherein said effector domain is selected from the group consisting of: transcriptional activator, transcriptional repressor, nuclear localization signal, and cell penetrating signal.
57. The nucleic acid molecule of embodiment 56, wherein said Cpf1 polypeptide is mutated to reduce or eliminate nuclease activity.
58. The nucleic acid molecule of embodiment 57, wherein said mutated Cpf1 polypeptide comprises a mutation in a position corresponding to positions 877 or 971 of SEQ ID NO:3 when aligned for maximum identity.
59. The nucleic acid molecule of any one of embodiments 55-58, wherein said Cpf1 polypeptide is fused to said effector domain with a linker.
60. The nucleic acid molecule of any one of embodiments 44-59, wherein said Cpf1 polypeptide forms a dimer.
61. A fusion protein encoded by the nucleic acid molecule of any one of embodiments 55-60.
62. A Cpf1 polypeptide encoded by the nucleic acid molecule of any one of embodiments 44-50.
63. A Cpf1 polypeptide having at least 80% identity with one or more polypeptide sequences selected from the group consisting of SEQ ID NOs: 9-11 and 36-38, wherein said polypeptide is mutated to reduce or eliminate nuclease activity.
64. The Cpf1 polypeptide of embodiment 63, wherein said mutated Cpf1 polypeptide comprises a mutation in a position corresponding to positions 877 or 971 of SEQ ID NO:3 when aligned for maximum identity.
65. A eukaryotic cell or prokaryotic cell comprising the nucleic acid molecule of any one of embodiments 44-60.
66. A eukaryotic cell or prokaryotic cell comprising the fusion protein or polypeptide of any one of embodiments 61-64.
67. A plant cell produced by the method of any one of embodiments 1, 3, and 5-36.
68. A plant comprising the nucleic acid molecule of any one of embodiments 44-60.
69. A plant comprising the fusion protein or polypeptide of any one of embodiments 61-64.
70. A plant produced by the method of any one of embodiments 1, 3, and 5-36.
71. The seed of the plant of any one of embodiments 68-70.
72. The method of any one of embodiments 1, 3, and 5-36 wherein said modified nucleotide sequence comprises insertion of a polynucleotide that encodes a protein conferring antibiotic or herbicide tolerance to transformed cells.
73. The nucleic acid molecule of any one of embodiments 45-60 wherein said polynucleotide sequence encoding a Cpf1 polypeptide further comprises a polynucleotide sequence encoding a nuclear localization signal.
74. The nucleic acid molecule of embodiment 73 wherein said nuclear localization signal comprises SEQ ID NO:1 or is encoded by SEQ ID NO:2.
75. The nucleic acid molecule of any one of embodiments 45-60 wherein said polynucleotide sequence encoding a Cpf1 polypeptide further comprises a polynucleotide sequence encoding a chloroplast signal peptide.
76. The nucleic acid molecule of any one of embodiments 45-60 wherein said polynucleotide sequence encoding a Cpf1 polypeptide further comprises a polynucleotide sequence encoding a mitochondrial signal peptide.
77. The nucleic acid molecule of any one of embodiments 45-60 wherein said polynucleotide sequence encoding a Cpf1 polypeptide further comprises a polynucleotide sequence encoding a signal peptide that targets said Cpf1 polypeptide to multiple subcellular locations.
78. The fusion protein of embodiment 61 wherein said fusion protein further comprises a nuclear localization signal, chloroplast signal peptide, mitochondrial signal peptide, or signal peptide that targets said Cpf1 polypeptide to multiple subcellular locations.
79. The Cpf1 polypeptide of any one of embodiments 62-64 wherein said Cpf1 polypeptide further comprises a nuclear localization signal, chloroplast signal peptide, mitochondrial signal peptide, or signal peptide that targets said Cpf1 polypeptide to multiple subcellular locations.
80. A method of modifying a nucleotide sequence at a target site in vitro comprising:

[0177] Contacting the target DNA in vitro with:
[0178] (i) a DNA-targeting RNA, or a DNA polynucleotide encoding a DNA-targeting RNA, wherein the DNA-targeting RNA comprises: (a) a first segment comprising a nucleotide sequence that is complementary to a targeted sequence; and (b) a second segment that interacts with a Cpf1 polypeptide; and
[0179] (ii) a Cpf1 polypeptide, or a polynucleotide encoding a Cpf1 polypeptide, wherein the Cpf1 polypeptide comprises: (a) an RNA-binding portion that interacts with the DNA-targeting RNA; and (b) an activity portion that exhibits site-directed enzymatic activity,
   wherein said Cpf1 polypeptide comprises an arginine at the position corresponding to D172 in SEQ ID NO:3, wherein said targeted sequence is located immediately 3′ of a PAM site, and wherein said Cpf1 polypeptide recognizes a TTTC PAM site.
   81. The method of embodiment 80 wherein said Cpf1 polypeptide shares at least 95% identity with a sequence selected from the group consisting of SEQ ID NOs:9-11 and 36-38.
   82. The method of embodiment 80 wherein said Cpf1 polypeptide comprises a sequence selected from the group consisting of SEQ ID NOs:9-11 and 36-38.
   83. The composition of any one of embodiments 46 and 47 wherein said prokaryotic cell is not the natural host of said polynucleotide sequence encoding a Cpf1 polypeptide.

[0180] The following examples are offered by way of illustration and not by way of limitation.

### EXPERIMENTAL

### Example 1—In Vitro Testing of Cpf1 Nuclease Activity

[0181] Wild type Cpf1 nucleases and select variants thereof were tested in an in vitro assay performed at a range of different temperatures to determine their relative activities at each temperature. Wild type McCpf1, Pb2Cpf1, and COE1Cpf1 nuclease protein sequences (Table 1) were aligned using MUSCLE (FIG. 1) to identify corresponding residues among these three sequences. The D172 residue in SEQ ID NO: 3, E173 residue in SEQ ID NO: 5, and Q161 residue in SEQ ID NO: 7 were identified as candidates for mutation. Accordingly, each of these residues was altered to an arginine residue, resulting in SEQ ID NOs: 9-11.

TABLE 1
Core Cpf1 nucleases

| Cpf1 nuclease | SEQ ID NO |
|---|---|
| McCpf1 | 3 |
| Pb2Cpf1 | 5 |
| COE1Cpf1 | 7 |
| McCpf1 D172R | 9 |
| Pb2Cpf1 E173R | 10 |
| COE1Cpf1 Q161R | 11 |

[0182] SEQ ID NOs: 3, 5, 7, and 9-11 were modified with N-terminal nuclear localization signal (SV40 NLS, SEQ ID NO: 1) flanked by an alanine and methionine residue and a C-terminal 10×His tag (SEQ ID No: 74) for purification and detection purposes. In the case of McCpf1, a linker (Linker 1, SEQ ID NO: 2) was inserted between the nuclease sequence and 10×His tag. These modifications gave SEQ ID NOs: 35-38 and 140-141 (Table 2). In vitro nuclease assays were performed with each of the proteins listed in Table 2 at a fixed time of 10 min at temperatures ranging from 20-50° C.

TABLE 2
Cpf1 nucleases modified with N-terminal
SV40 NLS and a C-terminal 10xHis tag

| Cpf1 Nuclease | SEQ ID NO |
|---|---|
| McCpf1 | 38 |
| Pb2Cpf1 | 140 |
| COE1Cpf1 | 141 |
| McCpf1 D172R | 35 |
| Pb2Cpf1 E173R | 36 |
| COE1Cpf1 Q161R | 37 |

[0183] A thermocycler instrument was utilized in the assay to set the temperature. The assays were run in duplicate or triplicate and initiated with addition of the nuclease, or buffer in the case of control samples. The assay volume was 104, and contained 100 mM NaCl pH 7.9, 50 mM Tris-HCl, 10 mM MgCl₂, 100 μg/ml BSA, 16 ng/μL target DNA (SEQ ID NO: 18), 25 gRNA (SEQ ID NO: 19), and 25 ng/μL nuclease. The reaction was quenched with addition of 500 mM EDTA to a final concentration of 83 mM. Quenched samples were loaded and run on a 1% agarose gel for analysis.

[0184] Images of the resulting gels were used for densitometry analysis. Each gel contained two or more negative controls that contained the parent target DNA that was not exposed to any nuclease. The density of the uncleaved target DNA bands were measured using image processing software. Table 3 shows the results of these assays with the McCpf1, McCpf1 D172R, COE1Cpf1, and COE1Cpf1 Q161R nucleases.

TABLE 3
Percentage of Cleaved Target DNA at each temperature

| | McCpf1 | McCpf1 D172R | COE1Cpf1 | COE1Cpf1 Q161R |
|---|---|---|---|---|
| Temp | (SEQ ID | (SEQ ID | (SEQ ID | (SEQ ID |
| (° C.) | NO: 38) | NO: 35) | NO: 141) | NO: 37) |
| 20 | 28.1% | 85.5% | 10.3% | 14.9% |
| 25 | 92.2% | 98.3% | 0.5% | 18.7% |
| 30 | 70.7% | 98.9% | 17.2% | 54.3% |
| 33 | 90.9% | 98.2% | 43.3% | 82.2% |
| 38 | 95.8% | 98.7% | 45.7% | 87.7% |
| 45 | 96.3% | 98.6% | 84.9% | 92.4% |
| 50 | 94.8% | 98.6% | 86.3% | 95.7% |

[0185] Table 3 shows that the McCpf1 D172R nuclease more readily cleaved the target DNA in vitro at lower temperatures than the native Mc nuclease, specifically at 20° C. and 25° C. temperatures. The COE1 Q161R nuclease also more readily cleaved the target DNA in vitro than the native COE1 nuclease.

### Example 2—Cloning Plant Transformation Constructs

[0186] Based in part on the promising in vitro results, genes encoding the McCpf1 D172R nuclease and the Pb2 E173R nuclease were cloned into constructs suitable for plant transformation. Genes encoding the wild-type Mc and Pb2 nucleases were also cloned into constructs suitable for plant transformation. All nucleases were modified with an N-terminal SV40 NLS (SEQ ID NO: 1). Table 4 summarizes these constructs.

TABLE 4
Nuclease-encoding plant transformation constructs

| | Nuclease | Nuclease DNA | Vector DNA |
|---|---|---|---|
| Vector number | Encoded | SEQ ID NO | SEQ ID NO |
| 133670 | Pb2Cpf1 | 24 | 20 |
| | (SEQ ID NO: 142) | | |
| 133917 | Pb2Cpf1 E173R | 25 | 21 |
| | (SEQ ID NO: 143) | | |
| 133793 | McCpf1 | 26 | 22 |
| | (SEQ ID NO: 144) | | |
| 133918 | McCpf1 D172R | 27 | 23 |
| | (SEQ ID NO: 145) | | |

[0187] Each of the nuclease coding genes in these constructs was codon optimized for expression in plants and cloned downstream of an AtUbi11 promoter sequence (e.g. as in SEQ ID NOs: 20-23).

### Example 3—Gene Editing in Pea Protoplasts

[0188] Each of the plant transformation constructs listed in Table 4 was used to transfect pea (Pisum sativum) protoplasts along with plasmid 133806 (SEQ ID NO: 30), comprising a guide RNA designed to target the pea LOX2 (PsLOX2) gene, with the guide RNA cloned downstream from the MtU6 promoter (e.g. as in SEQ ID NO:30). Transfections with each of the constructs listed in Table 4 were performed in triplicate. Following transfection, the pea protoplast cells were harvested and DNA was extracted, then analyzed by next-generation sequencing (NGS). Table 5 summarizes the results of these NGS analyses, showing the average editing±standard deviation.

TABLE 5
NGS-derived Confirmation of PsLOX2 editing

| Vector DNA | Nuclease | Editing |
|---|---|---|
| SEQ ID NO | Encoded | Efficiency |
| 20 | Pb2Cpf1 | 0.32% ± 0.05% |
| | (SEQ ID NO: 142) | |
| 21 | Pb2Cpf1 E173R | 0.88% ± 0.11% |
| | (SEQ ID NO: 143) | |
| 22 | McCpf1 | 0.72% ± 0.12% |
| | (SEQ ID NO: 144) | |
| 23 | McCpf1 D172R | 2.23% ± 0.14% |
| | (SEQ ID NO: 145) | |

[0189] The data in table 5 shows that the McCpf1 D172R nuclease mediated approximately three-fold greater editing efficiency than the McCpf1 nuclease, and that the Pb2Cpf1 E173R nuclease mediated approximately three-fold greater editing efficiency than the P2Cpf1 nuclease. Without being limited by theory, these results may be explained in part by the improved activity of these mutants at lower temperatures, as pea transfection and cultivation is performed at a temperature of approximately 25° C., a temperature at which the mutant nucleases outperformed the wild-type nucleases in vitro.

### Example 4—Gene Editing in Tomato Protoplasts

[0190] The McCpf1 D172R nuclease (SEQ ID NO 145) was used to mediate gene editing in tomato protoplasts. Construct 133918 (SEQ ID NO:23) was transfected into tomato protoplasts along with an appropriate construct for expression of a guide RNA designed to target the tomato PG gene (SlPG; SEQ ID NO: 34). Constructs 133911 (SEQ ID NO: 31), 133912 (SEQ ID NO: 32), and 133914 (SEQ ID NO: 33) were used for these experiments. Each of the transfections was performed in triplicate. Following transfection, the tomato protoplast cells were harvested and DNA was extracted, then analyzed by next-generation sequencing (NGS). Table 6 summarizes the results of these NGS analyses, showing the average editing±standard deviation.

TABLE 6
NGS-derived Confirmation of SlPG editing

| | Editing |
|---|---|
| Guide Construct | Efficiency |
| 133911 | 4.149 ± 0.716% |
| 133912 | 7.625 ± 0.806% |
| 133914 | 3.946 ± 1.192% |

[0191] The data in table 6 show that the McCpf1 D172R nuclease mediated efficient genome editing of the SlPG gene at three sites.

### Example 5—Gene Editing in Zebrafish

[0192] Temperature has been shown to be an important determinant of Cpf1-mediated genome editing in zebrafish and Xenopus (Moreno-Mateos 2017 Nat Commun 8:2024). The McCpf1 D172R nuclease, Pb2Cpf1 E173R nuclease, and/or COE1Cpf1 Q161R nuclease is/are used to mediate genome editing in zebrafish. One or more purified ribonucleoprotein (RNP) complexes comprising the nuclease with a suitable guide RNA or guide RNAs designed to complex with the nuclease and to target one or more gene(s) of interest in the zebrafish genome are injected into zebrafish embryos as described previously (Moreno-Mateos 2017 Nat Commun 8:2024). Alternatively, a DNA or mRNA molecule encoding the nuclease is injected into zebrafish embryos along with one or more guide RNA(s) designed to target one or more gene(s) of interest in the zebrafish genome as described previously (Moreno-Mateos 2017 Nat Commun 8:2024). Following these injections, DNA is extracted for sequence analysis of the targeted portions of the zebrafish genome. Zebrafish may also be observed for phenotypic modifications associated with the intended genomic modifications.

### Example 6—Gene Editing in Maize

[0193] Temperature has been shown to be an important determinant of Cpf1-mediated genome editing in maize (WO2017/218185; Malzahn et al 2019 BMC Biol 17:9). The McCpf1 D172R nuclease, Pb2Cpf1 E173R nuclease, and/or COE1Cpf1 Q161R nuclease is/are used to mediate genome editing in maize. One or more DNA or RNA molecules encoding the nuclease of interest along with one or more guide RNA molecule(s) or DNA molecules encoding one or more guide RNA molecules are introduced into maize cells via transfection, biolistic bombardment, Agrobacterium, Ochrobactrum, Ensifer, or other methods for introduction of DNA into plant cells that are known in the art. The DNA or RNA molecule encoding the nuclease and the DNA or RNA molecule encoding the guide RNA(s) may be connected, or may be introduced as two separate molecules. Alternatively, one or more purified ribonucleoprotein (RNP) complexes comprising the nuclease with a suitable guide RNA or guide RNAs designed to complex with the nuclease and to target one or more gene(s) of interest in the maize genome are introduced into maize cells via methods previously described in the art for RNP introduction into plant cells (Svitashev et al 2016 Nat Commun 7:13274). Following introduction of the DNA or RNA encoding the nuclease and guide RNA(s) or of the RNP(s), DNA is extracted from the maize cells or from plants regenerated therefrom for sequence analysis of the targeted portions of the maize genome. Maize plants or cells may also be observed for phenotypic modifications associated with the intended genomic modifications.

### Example 7—Gene Editing in Arabidopsis

[0194] Temperature has been shown to be an important determinant of Cpf1-mediated genome editing in Arabidopsis (WO2017/218185; Malzahn et al 2019 BMC Biol 17:9). The McCpf1 D172R nuclease, Pb2Cpf1 E173R nuclease, and/or COE1Cpf1 Q161R nuclease is/are used to mediate genome editing in Arabidopsis. One or more DNA or RNA molecules encoding the nuclease of interest along with one or more guide RNA molecule(s) or DNA molecules encoding one or more guide RNA molecules are introduced into Arabidopsis cells via transfection, biolistic bombardment, floral dip transformation, Agrobacterium, Ochrobactrum, Ensifer, or other methods for introduction of DNA into plant cells that are known in the art. The DNA or RNA molecule encoding the nuclease and the DNA or RNA molecule encoding the guide RNA(s) may be connected, or may be introduced as two separate molecules. Alternatively, one or more purified ribonucleoprotein (RNP) complexes comprising the nuclease with a suitable guide RNA or guide RNAs designed to complex with the nuclease and to target one or more gene(s) of interest in the Arabidopsis genome are introduced into Arabidopsis cells via methods previously described in the art for RNP introduction into plant cells (Svitashev et al 2016 Nat Commun 7:13274). Following introduction of the DNA or RNA encoding the nuclease and guide RNA(s) or of the RNP(s), DNA is extracted from the Arabidopsis cells or from plants regenerated therefrom for sequence analysis of the targeted portions of the Arabidopsis genome. Arabidopsis plants or cells may also be observed for phenotypic modifications associated with the intended genomic modifications.

### Example 8—Cpf1 Cleavage Efficiency Testing Using a Fluorogenic Substrate

[0195] An additional set of McCpf1 mutants (SEQ ID NO: 39-68) were designed and tested in vitro in a microplate reader assay using a fluorogenic substrate. McCpf1, McCpf1 D172R, and Mc.41-61Cpf1 were modified with an N-terminal alanine to facilitate cloning and a C-terminal nucleoplasmin nuclear localization signal (SEQ ID NO: 69) followed by a linker (Linker 2, SEQ ID NO: 71), a 3× Hemagglutinin tag to facilitate immunoblotting (SED ID NO: 75), another linker (Linker 2, SEQ ID NO: 71), an SV40 nuclear localization signal (SEQ ID NO: 1), another linker (Linker 3, SEQ ID NO: 72), a 10×His tag to facilitate protein purification (SEQ ID NO: 74), another linker (Linker 4, SEQ ID NO: 73), and a HiBit tag (with a commercially available Promega Corporation Nano-Glo HiBit Lytic Detection System #N3030; as described for example, in Schwinn et al., ACS Chem Biol 2018 13:467-474) to facilitate protein quantification (SEQ ID NO: 76). Mc.3Cpf1, Mc.4Cpf1, Mc.5Cpf1, and Mc.7Cpf1 were modified with an N-terminal SV40 NLS (SEQ ID NO: 1) flanked by an alanine and methionine and a C-terminal linker (Linker 1, SEQ ID NO: 70) attached to a 10×His tag to facilitate purification (SEQ ID NO: 74). SEQ ID NOs for the complete fusion proteins purified for these experiments are provided in Table 7.

[0196] The substrate used in this microplate reader assay was prepared by annealing two complementary, chemically modified oligonucleotides. One oligo (the forward oligo) encoded a TTTN PAM and has a 3′ quencher modification, while the other (the reverse oligo) was modified with a fluorophore at the 5′ end. The forward oligo encoded 12 arbitrary bases followed by the TTTN PAM and 24 bases corresponding to the spacer sequence of the guide RNA of interest. Cleavage of this substrate by Cpf1-gRNA complex caused dissociation of the fluorophore-quencher pair, resulting in a fluorescent signal proportional to the number of catalytic events.

[0197] Each reaction was carried out in triplicate in 100 nM NaCl, 50 mM Tris-HCl pH 7.9, 10 mM MgCl2, and 100 μg/mL Bovine Serum Albumin at 25° C. with 1.5 μg purified Cpf1 protein, 200 nM guide RNA, and 50 nM fluorogenic substrate in a 100 μL volume. Reaction time courses were monitored by measuring fluorescence at 648/668 nm excitation/emission every minute for one hour in a microplate reader. Data from identical reactions were averaged (n=3), and initial reaction rates were determined by fitting a line to the first five values in each time course. These rates were then normalized to that of Mc.2Cpf1. The results are shown in Table 11.

TABLE 7
Results of Cpf1 Editing Efficiency Testing
Using a Fluorogenic Substrate.

| | | | | | Activity |
|---|---|---|---|---|---|
| | | | | Standard | Relative |
| SEQ ID | McCpf1 | | Slopes | Error | to McCpf1 |
| NO | Variant | Mutation(s) | (Fl/min) | (Fl/min) | (%) |
| 81 | McCpf1 | Wild Type | 80.0 | 7.6 | 100.0 |
| 82 | McCpf1 | D172R | 273.5 | 20.6 | 341.7 |
| | D172R | | | | |
| 77 | Mc.3Cpf1 | G169R | 216.9 | 18.9 | 271.1 |
| 79 | Mc.4Cpf1 | N176R | 168.7 | 13.9 | 210.7 |
| 78 | Mc.5Cpf1 | D172K | 255.0 | 7.0 | 318.6 |
| 80 | Mc.7Cpf1 | D172A | 200.7 | 10.6 | 250.8 |
| 83 | Mc.41Cpf1 | N571R | 119.9 | 13.4 | 149.8 |
| 84 | Mc.42Cpf1 | M838L | 49.8 | 7.1 | 62.3 |
| 85 | Mc.43Cpf1 | N571R | 130.5 | 8.9 | 163.1 |
| | | M838L | | | |
| 86 | Mc.44Cpf1 | D172R | 153.6 | 16.7 | 192.0 |
| | | N571R | | | |
| 87 | Mc.45Cpf1 | D172R | 235.9 | 16.1 | 294.8 |
| | | M838L | | | |
| 88 | Mc.46Cpf1 | D172R | 236.6 | 9.8 | 295.6 |
| | | N571R | | | |
| | | M838L | | | |
| 89 | Mc.47Cpf1 | D172R | 149.3 | 7.4 | 186.5 |
| | | E540R | | | |
| 90 | Mc.48Cpf1 | D172R | 90.2 | 12.4 | 112.7 |
| | | P630G | | | |
| 91 | Mc.49Cpf1 | D172R | 196.5 | 14.5 | 245.5 |
| | | P651E | | | |
| 92 | Mc.50Cpf1 | D172R | 213.8 | 6.5 | 267.1 |
| | | D539K | | | |
| 93 | Mc.51Cpf1 | D172R | 216.6 | 10.3 | 270.6 |
| | | N549V | | | |
| 94 | Mc.52Cpf1 | D172R | 136.0 | 5.5 | 169.9 |
| | | R881S | | | |
| 95 | Mc.53Cpf1 | D172R | 175.7 | 4.7 | 219.5 |
| | | N568T | | | |
| 96 | Mc.54Cpf1 | D172R | 204.2 | 6.3 | 255.1 |
| | | N576K | | | |
| 97 | Mc.55Cpf1 | D172R | 209.4 | 7.3 | 261.6 |
| | | S556L | | | |
| 98 | Mc.56Cpf1 | D172R | 207.2 | 6.0 | 258.9 |
| | | G875A | | | |
| 99 | Mc.57Cpf1 | D172R | 183.4 | 4.7 | 229.1 |
| | | I876A | | | |
| 100 | Mc.58Cpf1 | D172R | 135.9 | 7.4 | 169.8 |
| | | N549R | | | |
| 101 | Mc.59Cpf1 | D172R | 167.6 | 9.0 | 209.5 |
| | | R552K | | | |
| 102 | Mc.60Cpf1 | D172R | 252.7 | 3.4 | 315.7 |
| | | N568M | | | |
| 103 | Mc.61Cpf1 | D172R | 31.3 | 6.1 | 39.1 |
| | | D877A | | | |
| | | E971A | | | |

[0198] The catalytically inactive mutant of McCpf1 (D172R D877A E971A, Mc.61Cpf1 SEQ ID NO: 103) displayed minimal activity in this assay, and this residual activity is presumably due to the physical separation of the fluorophore-quencher pair caused by Cpf1 binding and RNA-DNA duplex formation. Consistent with this observation, the final fluorescence signal achieved in Mc.61Cpf1 reactions was approximately one-fifth that of other McCpf1 variants tested despite equivalent protein loading. Purified McCpf1 protein caused no increase in fluorescence signal in the absence of guide RNA.

### Example 9—Cpf1 Editing Efficiency Testing at Different Temperatures

[0199] Cpf1 sequence variants were screened for improved performance in vitro at a range of temperatures. A SV40 NLS tag (SEQ ID NO: 1) flanked by an alanine and a methionine was added to the N terminus and a linker (Linker 1, SEQ ID NO: 70) followed by a 10× His tag (SEQ ID NO: 74) was added to the C terminus. Purified protein was used for in vitro testing.

Fixed temperature assays were carried out as a time course of 2.5, 5, 10, 15, and 20 min (21 and 24° C.) or 0.25, 0.5, and 1 min (30 and 37° C.) in a thermocycler. The assays were performed in duplicate and initiated with addition of the nuclease, or buffer in the case of control samples. The assay volume was 60 μL (21 and 24° C.) or 40 μL (30 and 37° C.) and contained 100 mM NaCl pH 7.9, 50 mM Tris-HCl, 10 mM MgCl₂, 100 μg/ml BSA, 15 ng/μL (14.8 nM) target DNA (SEQ ID NO: 18), 2.5 ng/μL (181 nM) corresponding gRNA (SEQ ID NO: 19), and 20 ng/μL (137 nM) nuclease. The nuclease concentrations were corrected for any variation in measured purity. At the time point, a 10 μL aliquot was removed and quenched with addition of 500 mM EDTA to a final concentration of 83 mM. Quenched samples were loaded and run on a 1% agarose gel. Each experiment was repeated twice and the results of the two replicates averaged and shown in Table 7 along with the error given as the standard deviation.

[0200] Nuclease activity was quantified by measuring the amount of parent target DNA (SEQ ID NO: 18) remaining on the stained agarose gel by densitometry. The amount of DNA remaining was divided by the density of the negative control (CAO1 without nuclease) to generate % remaining. The % remaining was converted into pmol of CAO1 consumed using the starting amount of CAO1 DNA in the reaction. Specific activity was calculated using pmol of CAO1 consumed at a time point in the linear response range of the time course according to the following equation:

$$\frac{( \% CAO 1 Consumed \times [ Initial target DNA ( pmol ) ] )}{mg Nuclease \times Time ( min )} = Specific Activity ( pmol CAO 1 / min / mg )$$

TABLE 8
Average Nuclease Activity Measurements ± Standard Deviation

| SEQ ID | Nuclease | Nuclease Activity (pmol/min/mg) | | | |
|---|---|---|---|---|---|
| NO | Encoded | 21° C. | 24° C. | 30° C. | 37° C. |
| 38 | McCpf1 | 53 ± 18 | 153 ± 34 | 632 ± 18 | 3513 ± 12 |
| 35 | McCpf1 | 198 ± 22 | 317 ± 20 | 1236 ± 92 | 3373 ± 24 |
| | D172R | | | | |
| 77 | Mc.3Cpf1 | 177 ± 48 | 287 ± 15 | 1019 ± 51 | 3020 ± 491 |
| | (G169R) | | | | |
| 78 | Mc.5Cpf1 | 117 ± 22 | 302 ± 16 | 1050 ± 46 | 3552 ± 45 |
| | (D172K) | | | | |
| 79 | Mc.4Cpf1 | 46 ± 29 | 185 ± 16 | 829 ± 77 | 3199 ± 67 |
| | (N176R) | | | | |
| 80 | Mc.7Cpf1 | 62 ± 26 | 231 ± 49 | 879 ± 61 | 3298 ± 185 |
| | (D172A) | | | | |

### Example 10—Cpf1 Editing Efficiency Testing in Pea (Pisum sativum)

[0201] Vectors encoding McCpf1 variants modified with an N-terminal alanine residue to facilitate cloning and a C-terminal nucleoplasmin NLS (SEQ ID NO: 69) attached to a linker (Linker 2, SEQ ID NO: 71), a 3×HA tag (SEQ ID NO: 75), another linker (Linker 2, SEQ ID NO: 71), and an SV40 NLS (SEQ ID NO: 1) were put into constructs for transformation and testing in pea protoplasts (see Table 9 below for relevant SEQ ID NOs). The same plant codon-optimized coding sequence was used for all variants and placed downstream of the AtUbi11 promoter sequence (e.g., as in SEQ ID NOs: 20-23). Vectors listed below were co-transfected with guide RNA vector 133470 (SEQ ID NO: 121) using methods described herein. Samples were taken 48 hours post transfection and editing efficiency of biological triplicates were determined by digital droplet PCR (ddPCR) according to standard methods of the art, as described, for example, in Findlay et al. (2016 PlosOne 0153901) and BIORAD website (bio-rad.com/webroot/web/pdf/lsr/literature/Bulletin_6872.pdf).

TABLE 9
Results of Cpf1 Editing Efficiency Testing in Pea
using Guide RNA Vector 133470 (SEQ ID NO: 121)

| | | | Editing |
|---|---|---|---|
| Protein | Vector | Nuclease | Efficiency |
| SEQ ID NO | SEQ ID NO | Encoded | (%) |
| 104 | 123 | McCpf1 | 3.22 ± 0.38 |
| 105 | 124 | McCpf1 | 6.18 ± 1.17 |
| | | D172R | |
| 106 | 125 | Mc.3Cpf1 | 8.13 ± 0.92 |
| | | (G169R) | |
| 107 | 126 | Mc.11Cpf1 | 7.07 ± 0.72 |
| | | (D172K, G169R) | |
| 108 | 127 | Mc.9Cpf1 | 6.81 ± 0.77 |
| | | (D172R, N176R) | |
| 109 | 128 | Mc.10Cpf1 | 5.74 ± 0.88 |
| | | (D172R, G169R) | |
| 110 | 129 | Mc.6Cpf1 | 4.88 ± 0.66 |
| | | (D172H) | |
| 111 | 130 | Mc.5Cpf1 | 4.60 ± 0.68 |
| | | (D172K) | |
| 112 | 131 | Mc.7Cpf1 | 4.32 ± 0.86 |
| | | (D172A) | |
| 113 | 132 | Mc.4Cpf1 | 3.81 ± 0.32 |
| | | (N176R) | |
| 114 | 133 | Mc.8Cpf1 | 3.12 ± 0.54 |
| | | (D172W) | |

[0202] The editing efficiencies of variants were also tested using the guide RNA vector 134147 (SEQ ID NO: 122) instead of guide RNA vector 133470 (AtU6_LOX2-8).

TABLE 10
Results of Cpf1 Editing Efficiency Testing in Pea
using Guide RNA Vector 134147 (AtU11_LOX2-8)

| | | | Editing |
|---|---|---|---|
| Protein | Vector | Nuclease | efficiency |
| SEQ ID NO | SEQ ID NO | Encoded | (%) |
| 104 | 123 | McCpf1 | 2.25 ± 0.09 |
| 105 | 124 | McCpf1 | 4.47 ± 0.81 |
| | | D172R | |
| 115 | 134 | Mc.41Cpf1 | 3.36 ± 0.20 |
| | | (N571R) | |
| 116 | 135 | Mc.42Cpf1 | 2.61 ± 0.40 |
| | | (M838L) | |
| 117 | 136 | Mc.43Cpf1 | 4.51 ± 0.64 |
| | | (N571R, M838L) | |
| 118 | 137 | Mc.44Cpf1 | 5.81 ± 0.58 |
| | | (D172R, N571R) | |
| 119 | 138 | Mc.45Cpf1 | 6.07 ± 0.56 |
| | | (D172R, M838L) | |
| 120 | 139 | Mc.46Cpf1 | 5.89 ± 0.21 |
| | | (D172R, N571R, M838L) | |

### Example 11—Cpf1 Editing Efficiency Testing in Tomato

[0203] Tomato protoplasts were co-transfected with the vectors listed below and guide RNA vector 133912 (AtU6_PG2-4, SEQ ID NO: 32). Samples were analyzed 24 hours post transfection and editing efficiency of biological triplicates were determined by ddPCR using methods described herein. The same experiment was repeated for a total of two trials.

TABLE 11
Results of Cpf1 Editing Efficiency Testing in Tomato

| | | | | Editing |
|---|---|---|---|---|
| | Protein | Vector | Nuclease | Efficiency |
| Trial | SEQ ID NO | SEQ ID NO | Encoded | (%) |
| 1 | 105 | 124 | McCpf1 | 8.57 ± 0.06 |
| | | | D172R | |
| | 108 | 127 | Mc.9Cpf1 | 15.70 ± 0.66 |
| | | | (D172R, N176R) | |
| | 113 | 132 | Mc.4Cpf1 | 5.73 ± 0.35 |
| | | | (N176R) | |
| 2 | 105 | 124 | McCpf1 | 11.79 ± 0.20 |
| | | | D172R | |
| | 108 | 127 | Mc.9Cpf1 | 14.30 ± 0.13 |
| | | | (D172R, N176R) | |
| | 113 | 132 | Mc.4Cpf1 | 6.23 ± 0.15 |
| | | | (N176R) | |

The application's sequence listing, which the Patent Office published only in electronic form, follows.

SEQUENCE LISTING (145 sequences)

SEQ ID NO: 1 - protein, 9 aa, Simian Virus 40
  MISC_FEATURE (1)..(9): nuclear localization signal
MAPKKKRKV

SEQ ID NO: 2 - DNA, 27 bp, Simian Virus 40
  misc_feature (1)..(27): nuclear localization signal
atggccccaaagaagaaacggaaggtt

SEQ ID NO: 3 - protein, 1264 aa, Moraxella caprae
  MISC_FEATURE (1)..(1264): McCpf1
MLFQDFTHLYPLSKTMRFELKPIGKTLEHIHAKNFLSQDETMADMYQKVKAILDDYHRDFIADMMGEVKLTKLAEFYDVYLKFRKNPKDDGLQKQLKDLQAVLRKEIVKPIGNGGKYKAGYDRLFGAKLFKDGKELGDLAKFVIAQEGESSPKLAHLAHFEKFSTYFTGFHDNRKNMYSDEDKHTAITYRLIHENLPRFIDNLQILATIKQKHSALYDQIINELTASGLDVSLASHLDGYHKLLTQEGITAYNTLLGGISGEAGSRKIQGINELINSHHNQHCHKSERIAKLRPLHKQILSDGMGVSFLPSKFADDSEMCQAVNEFYRHYADVFAKVQSLFDGFDDHQKDGIYVEHKNLNELSKQAFGDFALLGRVLDGYYVDVVNPEFNERFAKAKTDNAKAKLTKEKDKFIKGVHSLASLEQAIEHYTARHDDESVQAGKLGQYFKHGLAGVDNPIQKIHNNHSTIKGFLERERPAGERALPKIKSGKNPEMTQLRQLKELLDNALNVAHFAKLLTTKTTLDNQDGNFYGEFGALYDELAKIPTLYNKVRDYLSQKPFSTEKYKLNFGNPTLLNGWDLNKEKDNFGIILQKDGCYYLALLDKAHKKVFDNAPNTGKNVYQKMIYKLLPGPNKMLPKVFFAKSNLDYYNPSAELLDKYAQGTHKKGNNFNLKDCHALIDFFKAGINKHPEWQHFGFKFSPTSSYQDLSDFYREVEPQGYQVKFVDINADYINELVEQGQLYLFQIYNKDFSPKAHGKPNLHTLYFKALFSKDNLANPIYKLNGEAQIFYRKASLDMNETTIHRAGEVLENKNPDNPKKRQFVYDIIKDKRYTQDKFMLHVPITMNFGVQGMTIKEFNKKVNQSIQQYDEVNVIGIDRGERHLLYLTVINSKGEILEQRSLNDITTASANGTQMTTPYHKILDKREIERLNARVGWGEIETIKELKSGYLSHVVHQISQLMLKYNAIVVLEDLNFGFKRGRFKVEKQIYQNFENALIKKLNHLVLKDEADDEIGSYKNALQLTNNFTDLKSIGKQTGFLFYVPAWNTSKIDPETGFVDLLKPRYENIAQSQAFFGKFDKICYNADKDYFEFHIDYAKFTDKAKNSRQIWKICSHGDKRYVYDKTANQNKGATKGINVNDELKSLFARHHINDKQPNLVMDICQNNDKEFHKSLIYLLKTLLALRYSNASSDEDFILSPVANDEGMFFNSALADDTQPQNADANGAYHIALKGLWVLEQIKNSDDLNKVKLAIDNQTWLNFAQNR

SEQ ID NO: 4 - DNA, 3795 bp, Moraxella caprae
  misc_feature (1)..(3795): McCpf1 native coding sequence
atgttatttcaagactttactcatctataccccttatcaaaaaccatgcgttttgaattaaagcccattggcaagacattagagcatatccatgccaaaaactttttgagccaagatgagaccatggcggacatgtaccaaaaggtaaaggcgatactggacgattatcatcgtgattttatcgctgatatgatgggcgaagttaagctaactaagctggcagaattttatgatgtgtatttaaaatttagaaaaaatcccaaagacgatggattgcaaaaacagctaaaggacttgcaagcagttttaagaaaagagattgtgaagcccatcggtaatggcggaaaatataaggcgggttatgaccgcttatttggggcaaagctttttaaggacggcaaagagcttggtgatttggcgaaatttgtcatcgcccaagagggtgagtcatcgccaaagcttgctcaccttgcccattttgagaagtttagcacttactttactggttttcatgacaaccgcaaaaacatgtacagcgatgaggataaacacaccgccattacctatcgtctgattcatgaaaacttaccacgctttattgacaacctacaaatactggcaaccatcaaacaaaagcactcggcgttgtatgaccagattataaatgagctgactgcgagtggcttggatgtgtcgctggcaagtcatctggacggctatcacaagcttttaacccaagagggtatcacggcttataataccctgcttggcggtatcagtggcgaggcaggttctcgcaagatacaaggtatcaatgagcttatcaatagtcatcacaaccaacattgccacaaatccgaacgtatcgccaaattacgccccctacacaaacaaatcctaagcgacggcatgggtgtgtcatttttgccaagcaaatttgccgatgatagcgagatgtgccaagcggtcaatgaattttaccgccattatgctgatgtttttgccaaggtgcaaagcttatttgatgggtttgatgaccatcaaaaggacggcatttatgttgagcataaaaatttaaatgaactatccaagcaggcatttggtgattttgccttgttgggtcgggtactggacggctattatgtggatgtggtgaatccagagtttaatgagagatttgccaaagccaaaaccgacaatgccaaagcaaaactgacaaaagaaaaagacaaattcatcaaaggcgtgcattccttggcaagccttgagcaggcgatagagcattatactgctaggcatgatgatgagtctgtgcaggcaggcaaacttggacagtatttcaaacacggtctggcaggcgtggataatccaatccaaaaaatacacaacaaccacagcaccattaagggttttttggagcgtgaacgtccagcaggcgagcgagcattgcccaaaattaagtcaggcaaaaaccctgaaatgacacagttaagacagctaaaagagctgctagacaacgccctaaacgtggcgcattttgccaagttattaacgaccaaaaccacgctagacaaccaagacggcaatttttatggtgagtttggggcgttgtatgatgagcttgccaagattcccacgctttataacaaagtgcgtgattatctatcccaaaagccatttagtaccgaaaaatacaaattaaactttggcaatccgacattattaaacgggtgggatttgaataaagaaaaagataattttgggattatcttacaaaaagacggctgttattatttggcgttattagataaagctcataaaaaagtatttgataatgctccaaatacaggcaaaaatgtttatcaaaaaatgatttataaattattgcccggacctaataaaatgctacccaaagtattttttgccaagagtaatttggattattataacccttctgctgaactactggataaatatgcacaaggcacgcacaaaaaaggcaataattttaatctaaaagactgccatgcgttgattgatttttttaaggcgggtattaataaacatccagaatggcaacattttggttttaaattttcaccaaccagtagctatcaggatttgagtgatttttatagagaagtcgaaccacaaggttatcaagtaaaatttgtggatatcaacgccgattatattaacgagctggttgaacaaggtcagttgtatttattccagatttataataaagatttctcgcccaaggctcacggtaagcccaatttgcatactttgtattttaaggcgttgtttagcaaagataatcttgccaatccaatttataaattaaatggcgaggcacagatattttatcgtaaggcgtctttggatatgaatgaaaccaccattcatcgtgcaggcgaggtattagaaaataaaaatcctgataatcccaaaaagcgtcaatttgtctatgacatcatcaaagataaacgctatacccaagataagtttatgctacatgtgcctattaccatgaattttggtgtacagggcatgacgattaaagaatttaataaaaaagttaatcaaagcatacagcaatatgatgaggtaaatgtcataggcatagaccgtggcgagcgacatttgctatatctgacagtgattaatagcaaaggcgaaatcttagaacagcgtagtctcaatgacatcactaccgcatcggcaaatggtacacaaatgaccacgccttatcataagatactggacaagagagaaatagaacgcctaaatgctcgtgtcggttggggtgagattgagaccataaaagagctaaaatccggctatctaagccatgtggtacatcaaatcagccagcttatgcttaaatataatgccattgtggtgttagaggatttaaattttgggtttaagcgtggtcgctttaaggtggaaaaacaaatttaccaaaactttgaaaacgctctaatcaaaaagctaaaccatttggtattaaaagatgaggcagatgatgagattggttcatataaaaatgccctgcaattgaccaataattttactgatctaaaaagcattggcaaacaaacaggctttttattctatgtgcctgcatggaataccagtaaaatagaccctgaaacgggctttgtggatttgttaaaaccacgttatgaaaatatcgctcagtcgcaagcgttttttggtaaatttgataagatttgttataacgcagataaggattattttgaatttcatattgattatgccaaatttactgacaaagccaaaaactctcgccaaatatggaagatttgctcgcatggcgataaacgctatgtgtatgataaaaccgccaatcaaaataaaggggcgacaaagggtattaatgttaatgatgaattaaaatcgctatttgctcgtcatcacatcaatgacaaacagccaaatctggttatggatatttgccaaaataacgataaagaatttcataaatcgctgatatatctgttaaagacattgcttgcattacgctatagtaacgccagtagcgatgaagattttattctatcgcctgtggcaaatgatgagggtatgttttttaattcggcattggcggatgatacacagccacaaaatgcggatgccaatggggcatatcatatcgcattaaagggtttgtgggtgctagaacaaatcaaaaacagcgatgatttgaataaagtcaaacttgccattgacaatcaaacatggttaaacttcgctcaaaaccgctaa

SEQ ID NO: 5 - protein, 1257 aa, Prevotella bryantii B14
  MISC_FEATURE (1)..(1257): Pb2Cpf1
MQINNLKIIYMKFTDFTGLYSLSKTLRFELKPIGKTLENIKKAGLLEQDQHRADSYKKVKKIIDEYHKAFIEKSLSNFELKYQSEDKLDSLEEYLMYYSMKRIEKTEKDKFAKIQDNLRKQIADHLKGDESYKTIFSKDLIRKNLPDFVKSDEERTLIKEFKDFTTYFKGFYENRENMYSAEDKSTAISHRIIHENLPKFVDNINAFSKIILIPELREKLNQIYQDFEEYLNVESIDEIFHLDYFSMVMTQKQIEVYNAIIGGKSTNDKKIQGLNEYINLYNQKHKDCKLPKLKLLFKQILSDRIAISWLPDNFKDDQEALDSIDTCYKNLLNDGNVLGEGNLKLLLENIDTYNLKGIFIRNDLQLTDISQKMYASWNVIQDAVILDLKKQVSRKKKESAEDYNDRLKKLYTSQESFSIQYLNDCLRAYGKTENIQDYFAKLGAVNNEHEQTINLFAQVRNAYTSVQAILTTPYPENANLAQDKETVALIKNLLDSLKRLQRFIKPLLGKGDESDKDERFYGDFTPLWETLNQITPLYNMVRNYMTRKPYSQEKIKLNFENSTLLGGWDLNKEHDNTAIILRKNGLYYLAIMKKSANKIFDKDKLDNSGDCYEKMVYKLLPGANKMLPKVFFSKSRIDEFKPSENIIENYKKGTHKKGANFNLADCHNLIDFFKSSISKHEDWSKFNFHFSDTSSYEDLSDFYREVEQQGYSISFCDVSVEYINKMVEKGDLYLFQIYNKDFSEFSKGTPNMHTLYWNSLFSKENLNNIIYKLNGQAEIFFRKKSLNYKRPTHPAHQAIKNKNKCNEKKESIFDYDLVKDKRYTVDKFQFHVPITMNFKSTGNTNINQQVIDYLRTEDDTHIIGIDRGERHLLYLVVIDSHGKIVEQFTLNEIVNEYGGNIYRTNYHDLLDTREQNREKARESWQTIENIKELKEGYISQVIHKITDLMQKYHAVVVLEDLNMGFMRGRQKVEKQVYQKFEEMLINKLNYLVNKKADQNSAGGLLHAYQLTSKFESFQKLGKQSGFLFYIPAWNTSKIDPVTGFVNLFDTRYESIDKAKAFFGKFDSIRYNADKDWFEFAFDYNNFTTKAEGTRTNWTICTYGSRIRTFRNQAKNSQWDNEEIDLTKAYKAFFAKHGINIYDNIKEAIAMETEKSFFEDLLHLLKLTLQMRNSITGTTTDYLISPVHDSKGNFYDSRICDNSLPANADANGAYNIARKGLMLIQQIKDSTSSNRFKFSPITNKDWLIFAQEKPYLND

SEQ ID NO: 6 - DNA, 3774 bp, Prevotella bryantii B14
  misc_feature (1)..(3774): Pb2Cpf1 native coding sequence
atgcaaattaataatttaaaaattatatatatgaaattcactgattttacgggattatattccctttccaaaacattacgtttcgaactcaaacctataggtaaaacccttgaaaacatcaagaaagcaggtcttcttgaacaagatcagcatagagctgacagctacaagaaagtaaaaaagatcattgatgaataccacaaagcatttatcgaaaaatctttatcaaacttcgaactgaaataccaaagtgaagacaaattagactcactcgaagaatatttgatgtactattccatgaaacgcattgaaaaaacagaaaaagataaatttgctaaaatacaagataacctaagaaaacaaatcgctgatcacctgaaaggggatgaatcttataaaactattttcagcaaagatcttattcgtaaaaatttgcctgattttgtcaaatctgacgaagaacggacattaataaaagaatttaaggacttcaccacttactttaaaggtttttatgagaatcgtgaaaacatgtactctgctgaagataagtctacagctatatcacatcgcataattcatgagaatcttcctaagtttgttgataatattaatgcgttttcgaaaataattcttattcctgaactccgagaaaaattaaatcagatttatcaagattttgaagaatacttaaatgtagaaagcatcgatgaaatattccatcttgactatttcagcatggtgatgacacaaaaacagatagaagtttataatgccataattggtggtaaaagtaccaatgataagaaaattcagggtttaaatgagtacattaatctgtataatcagaaacacaaggattgtaaacttccaaaactaaagctgttattcaaacagattctaagcgatcgcattgcaatatcatggttgcctgacaactttaaggatgaccaagaagcgctcgattctattgatacatgctataagaacttattgaatgatggcaatgttttaggagagggtaatttaaaactattactggaaaatatagatacttataacctgaaaggaatattcattcgcaacgatttacagttgacagacatttcacaaaaaatgtatgctagttggaacgtcattcaagatgctgtcattcttgacttgaagaagcaggtttcacgcaagaaaaaagaatcagcagaagattataatgaccgcttaaagaaactctacacttcacaagagagtttctccatccagtacttaaatgactgtttacgtgcctatggaaaaactgaaaacatacaagattacttcgcaaaactaggagcagttaacaatgagcacgaacagaccattaatctatttgcacaagtaagaaatgcatatacatcagtacaagcaatacttactacaccatatcctgaaaacgcgaatttagcacaggacaaggagaccgtagcattaattaaaaatctccttgactctttaaaacgattgcaacgttttatcaaaccattactcggtaagggtgatgaaagtgataaagatgagcgcttttatggtgattttacacctttatgggaaacgcttaaccaaataactcctctttacaatatggttcgcaattatatgactcgtaaaccatattcacaagaaaaaattaaactcaattttgaaaatagtactcttttaggaggatgggacctgaataaagagcatgataacacagccattattctaagaaaaaacggtctatattatttggctatcatgaagaaaagtgccaataagatatttgacaaagataaactagataattctggagactgctacgaaaaaatggtatataaattactaccaggtgcaaacaagatgttaccaaaagttttcttctccaagtctaggattgatgaatttaagcctagtgaaaatattattgagaactacaaaaaaggaacacataaaaaaggtgccaatttcaacttagctgattgccataatctaattgatttcttcaaatcatcaatatccaaacatgaagactggagtaaattcaatttccacttttctgacacctcttcttatgaggatctcagtgatttttaccgcgaagtagagcaacaaggatattctataagcttctgtgatgtatctgtagagtatattaataaaatggtagagaaaggtgatctatatctcttccaaatttataataaggatttctctgaattcagcaaaggtacaccgaacatgcacacactatattggaactctttatttagtaaagagaatcttaataatatcatttataagttgaatggacaagcagaaatcttcttccgtaagaaaagcctcaactataaacgcccaactcatcctgctcaccaagctatcaagaataaaaataaatgcaatgagaaaaaggaaagcatattcgattacgacttggtaaaagacaagagatatactgtggataagttccaattccatgtacctataactatgaatttcaagagtacgggaaatactaacatcaatcagcaagttatagactatttgcgcacagaagacgatacccatattataggtatagatcgtggtgaacgtcatcttttatatcttgtcgtcatcgacagccacggcaaaatcgtagaacaatttaccttgaacgaaattgtaaatgagtatggtggcaatatttatcgtacaaattatcatgatcttcttgacacaagagaacaaaatcgagaaaaggcacgagaaagctggcaaacaattgagaatatcaaagaactgaaagaaggctatatttctcaagtaatccataagataactgacttgatgcaaaaatatcatgccgtggttgttttggaagatttgaacatgggattcatgcgtggtagacaaaaagtagaaaaacaagtttaccagaaatttgaagaaatgttgattaataaactaaattatctagtcaacaagaaggcagatcaaaattctgcaggaggacttttgcacgcttatcaacttacaagtaagtttgaaagtttccaaaaattaggaaagcaaagtggattcttattctatatccctgcctggaatacttcaaaaatagatcctgtaactggatttgtaaatttattcgacacacgatatgaaagtattgataaggcaaaagctttctttggaaaatttgacagtatcagatataatgccgataaagattggtttgaatttgcttttgactataacaactttacgacaaaagcagaaggaactagaaccaactggaccatttgtacttatggttcacgcataagaactttcagaaatcaagctaagaattcccaatgggacaacgaagagattgatttaacgaaagcctacaaagcgttctttgccaaacatggaataaatatctatgataatattaaggaagcaattgccatggaaacggagaagtccttctttgaagatttactacatttgttgaagttaacacttcagatgcgaaatagcattactggtacaaccacagattatttaatatctcctgttcacgattctaaaggtaatttctatgatagtagaatatgtgacaactcacttccagctaatgctgatgctaatggagcatataacatagcccgtaaaggtttaatgttgattcaacagattaaagactcaaccagttctaatcgcttcaaatttagtcctattaccaataaagattggcttatatttgctcaagaaaaaccttatcttaatgattga

SEQ ID NO: 7 - protein, 1230 aa, Lachnospiraceae bacterium COE1
  MISC_FEATURE (1)..(1230): COE1Cpf1
MHENNGKIADNFIGIYPVSKTLRFELKPVGKTQEYIEKHGILDEDLKRAGDYKSVKKIIDAYHKYFIDEALNGIQLDGLKNYYELYEKKRDNNEEKEFQKIQMSLRKQIVKRFSEHPQYKYLFKKELIKNVLPEFTKDNAEEQTLVKSFQEFTTYFEGFHQNRKNMYSDEEKSTAIAYRVVHQNLPKYIDNMRIFSMILNTDIRSDLTELFNNLKTKMDITIVEEYFAIDGFNKVVNQKGIDVYNTILGAFSTDDNTKIKGLNEYINLYNQKNKAKLPKLKPLFKQILSDRDKISFIPEQFDSDTEVLEAVDMFYNRLLQFVIENEGQITISKLLTNFSAYDLNKIYVKNDTTISAISNDLFDDWSYISKAVRENYDSENVDKNKRAAAYEEKKEKALSKIKMYSIEELNFFVKKYSCNECHIEGYFERRILEILDKMRYAYESCKILHDKGLINNISLCQDRQAISELKDFLDSIKEVQWLLKPLMIGQEQADKEEAFYTELLRIWEELEPITLLYNKVRNYVTKKPYTLEKVKLNFYKSTLLDGWDKNKEKDNLGIILLKDGQYYLGIMNRRNNKIADDAPLAKTDNVYRKMEYKLLTKVSANLPRIFLKDKYNPSEEMLEKYEKGTHLKGENFCIDDCRELIDFFKKGIKQYEDWGQFDFKFSDTESYDDISAFYKEVEHQGYKITFRDIDETYIDSLVNEGKLYLFQIYNKDFSPYSKGTKNLHTLYWEMLFSQQNLQNIVYKLNGNAEIFYRKASINQKDVVVHKADLPIKNKDPQNSKKESMFDYDIIKDKRFTCDKYQFHVPITMNFKALGENHFNRKVNRLIHDAENMHIIGIDRGERNLIYLCMIDMKGNIVKQISLNEIISYDKNKLEHKRNYHQLLKTREDENKSARQSWQTIHTIKELKEGYLSQVIHVITDLMVEYNAIVVLEDLNFGFKQGRQKFERQVYQKFEKMLIDKLNYLVDKSKGMDEDGGLLHAYQLTDEFKSFKQLGKQSGFLYYIPAWNTSKLDPTTGFVNLFYTKYESVEKSKEFINNFTSILYNQEREYFEFLFDYSAFTSKAEGSRLKWTVCSKGERVETYRNPKKNNEWDTQKIDLTFELKKLFNDYSISLLDGDLREQMGKIDKADFYKKFMKLFALIVQMRNSDEREDKLISPVLNKYGAFFETGKNERMPLDADANGAYNIARKGLWIIEKIKNTDVEQLDKVKLTISNKEWLQYAQEHIL

SEQ ID NO: 8 - DNA, 3693 bp, Lachnospiraceae bacterium COE1
  misc_feature (1)..(3693): COE1Cpf1 native coding sequence
atgcatgagaacaatggaaaaatagcagataatttcattggaatatatcctgtatcaaaaaccttgcgttttgaactaaaaccagtcggaaaaacacaagagtatattgagaaacatggaatattggatgaagacttaaaacgggcgggggactataagagcgtaaaaaaaataattgacgcttatcacaaatatttcattgatgaggcattaaatggaattcaattagacgggttaaaaaattattatgaactgtatgagaaaaaacgtgacaataatgaagagaaagagtttcagaaaatacagatgtcattgcgtaaacagattgtaaagagattttctgaacatccacaatacaaatacttatttaaaaaggaactgattaaaaatgtcctgcctgaatttacaaaagataatgcagaagagcagactctagtaaagtcatttcaggagtttacaacatactttgaaggttttcatcaaaatagaaaaaatatgtattctgatgaagaaaaatcaacagctattgcgtatcgcgttgtacatcaaaatctgcccaaatatattgataatatgcgtatattttccatgatattaaatacggatatacggagtgatttgacagaattattcaataatttgaaaaccaaaatggatataactatagtagaagaatattttgcaattgatggattcaataaggtagttaatcaaaagggaattgatgtctataatacaattttaggcgcttttagcactgatgataatacgaagataaaaggtctgaatgagtatatcaatttgtataaccaaaagaataaggcaaaactgccaaagctgaaaccgctttttaaacaaattttaagtgatagggataaaatatcttttattccggaacagtttgattcagatacagaagttttagaagcggttgatatgttctacaatagattactgcagtttgtgattgagaatgaagggcagataactataagcaaacttctaacaaatttttcggcatatgacttgaataaaatatatgtaaaaaatgatacgacaatatctgcaatatcaaatgatttatttgatgattggtcatatataagtaaagcggttcgggaaaactatgattcagaaaatgttgataaaaataagcgggcagcagcttatgaggaaaagaaagagaaagcgctttcaaaaattaagatgtattctatagaagagttaaatttctttgttaagaaatattcatgcaatgagtgccatatcgagggatattttgaacggagaatcttagaaattcttgataaaatgcgttatgcatatgaatcatgtaaaattttgcatgataagggattgataaacaacatatcattatgtcaagacaggcaggcgatttcagagttgaaagatttcttagattcaataaaagaagtgcaatggctgttaaaaccgcttatgattgggcaggagcaagcagataaagaggaagcattttatacagaacttttacggatatgggaagaacttgaaccgattacgctgctgtataataaagtgcgtaattatgtgacgaaaaagccttatacattggaaaaagtgaaattaaacttttataagtctacattattagatggatgggataaaaacaaagaaaaagataaccttggaatcattttattaaaagacggtcaatattacttgggaattatgaaccgaaggaacaataaaatagcagatgatgcccccttggctaaaacggataatgtatacaggaaaatggaatataaattattaaccaaagtaagtgcaaatctgcctcggatatttcttaaagataaatacaacccatcggaagagatgctggaaaagtacgaaaagggtacacatttaaaaggcgaaaacttctgcatagatgattgcagggaattaatagacttttttaagaaaggcatcaagcaatatgaagattgggggcaatttgattttaagttttccgatacggaatcatatgatgatattagtgcgttttataaagaggtagagcatcagggatacaaaataacatttagagatattgatgaaacatatattgatagtttggtaaatgagggaaaactttatctgtttcaaatatataataaagacttttcgccgtatagtaaaggaacaaaaaatctgcatacgttatactgggagatgctgttttcacaacagaatctacaaaatatcgtatataaattaaatggaaatgcggaaatattttatagaaaggcaagcattaatcaaaaagatgttgtcgtacataaggcggatttacctataaaaaataaggatccgcaaaatagtaaaaaagaaagtatgtttgactatgacataataaaagataaacgttttacctgcgataaataccaattccatgtaccaattacaatgaatttcaaagcgctaggtgagaatcattttaatcgcaaggtaaaccgtttgattcatgatgctgaaaatatgcatattataggaattgacagaggagaacgaaatcttatatatttgtgtatgatagacatgaagggaaacattgtaaagcaaatatcattaaatgagataatttcttatgataaaaacaaattggaacacaaaagaaattatcatcaattgttaaaaacacgggaagatgaaaataaaagcgcacgtcagagctggcagaccattcatacaatcaaagagttaaaggaaggatacctcagtcaggtaattcatgttataacggacttaatggtggaatataatgcgattgtagttttggaagatttaaattttggttttaagcaaggaaggcagaaatttgaaaggcaggtataccaaaaatttgagaaaatgttgattgataaattgaattatcttgtagataaatcaaaaggcatggacgaagatggagggctgctccatgcataccaacttacggatgaattcaaaagctttaagcagttgggaaaacaatcgggttttctttactatattcccgcatggaataccagcaaattagatccgacaacaggatttgttaatttattttatacgaaatatgagtctgttgaaaaatcaaaggaatttattaataattttacctcaatattatataatcaggaacgggaatattttgaatttttatttgattattccgcttttacttccaaagcagagggaagcagactgaaatggacagtgtgttctaaaggagaacgagttgaaacctatagaaatcccaagaagaacaacgaatgggatacgcaaaagatagatttaactttcgaattgaaaaaattgttcaatgattatagtatttcccttttggatggcgacttacgtgaacaaatgggaaaaattgataaagcagatttctataaaaaatttatgaaactgttcgcattgattgtacagatgcggaatagtgatgagcgggaagataagttaatatctccagtattaaataaatatggtgcgttttttgaaacgggtaagaatgaaagaatgcctttagatgcggatgcgaatggcgcgtataatattgcacgaaaaggtctttggattattgagaaaattaaaaatacggatgtagaacaactggataaggtaaaacttacaatatctaataaagaatggttacagtatgcacaggaacatatattataa

SEQ ID NO: 9 - protein, 1264 aa, Moraxella caprae
  MISC_FEATURE (1)..(1285): McCpf1 D172R
  MISC_FEATURE (181)..(181): D172R
MLFQDFTHLYPLSKTMRFELKPIGKTLEHIHAKNFLSQDETMADMYQKVKAILDDYHRDFIADMMGEVKLTKLAEFYDVYLKFRKNPKDDGLQKQLKDLQAVLRKEIVKPIGNGGKYKAGYDRLFGAKLFKDGKELGDLAKFVIAQEGESSPKLAHLAHFEKFSTYFTGFHRNRKNMYSDEDKHTAITYRLIHENLPRFIDNLQILATIKQKHSALYDQIINELTASGLDVSLASHLDGYHKLLTQEGITAYNTLLGGISGEAGSRKIQGINELINSHHNQHCHKSERIAKLRPLHKQILSDGMGVSFLPSKFADDSEMCQAVNEFYRHYADVFAKVQSLFDGFDDHQKDGIYVEHKNLNELSKQAFGDFALLGRVLDGYYVDVVNPEFNERFAKAKTDNAKAKLTKEKDKFIKGVHSLASLEQAIEHYTARHDDESVQAGKLGQYFKHGLAGVDNPIQKIHNNHSTIKGFLERERPAGERALPKIKSGKNPEMTQLRQLKELLDNALNVAHFAKLLTTKTTLDNQDGNFYGEFGALYDELAKIPTLYNKVRDYLSQKPFSTEKYKLNFGNPTLLNGWDLNKEKDNFGIILQKDGCYYLALLDKAHKKVFDNAPNTGKNVYQKMIYKLLPGPNKMLPKVFFAKSNLDYYNPSAELLDKYAQGTHKKGNNFNLKDCHALIDFFKAGINKHPEWQHFGFKFSPTSSYQDLSDFYREVEPQGYQVKFVDINADYINELVEQGQLYLFQIYNKDFSPKAHGKPNLHTLYFKALFSKDNLANPIYKLNGEAQIFYRKASLDMNETTIHRAGEVLENKNPDNPKKRQFVYDIIKDKRYTQDKFMLHVPITMNFGVQGMTIKEFNKKVNQSIQQYDEVNVIGIDRGERHLLYLTVINSKGEILEQRSLNDITTASANGTQMTTPYHKILDKREIERLNARVGWGEIETIKELKSGYLSHVVHQISQLMLKYNAIVVLEDLNFGFKRGRFKVEKQIYQNFENALIKKLNHLVLKDEADDEIGSYKNALQLTNNFTDLKSIGKQTGFLFYVPAWNTSKIDPETGFVDLLKPRYENIAQSQAFFGKFDKICYNADKDYFEFHIDYAKFTDKAKNSRQIWKICSHGDKRYVYDKTANQNKGATKGINVNDELKSLFARHHINDKQPNLVMDICQNNDKEFHKSLIYLLKTLLALRYSNASSDEDFILSPVANDEGMFFNSALADDTQPQNADANGAYHIALKGLWVLEQIKNSDDLNKVKLAIDNQTWLNFAQNR

SEQ ID NO: 10 - protein, 1257 aa, Prevotella bryantii B14
  MISC_FEATURE (1)..(1276): Pb2Cpf1E173R
  MISC_FEATURE (182)..(182): E173R
MQINNLKIIYMKFTDFTGLYSLSKTLRFELKPIGKTLENIKKAGLLEQDQHRADSYKKVKKIIDEYHKAFIEKSLSNFELKYQSEDKLDSLEEYLMYYSMKRIEKTEKDKFAKIQDNLRKQIADHLKGDESYKTIFSKDLIRKNLPDFVKSDEERTLIKEFKDFTTYFKGFYRNRENMYSAEDKSTAISHRIIHENLPKFVDNINAFSKIILIPELREKLNQIYQDFEEYLNVESIDEIFHLDYFSMVMTQKQIEVYNAIIGGKSTNDKKIQGLNEYINLYNQKHKDCKLPKLKLLFKQILSDRIAISWLPDNFKDDQEALDSIDTCYKNLLNDGNVLGEGNLKLLLENIDTYNLKGIFIRNDLQLTDISQKMYASWNVIQDAVILDLKKQVSRKKKESAEDYNDRLKKLYTSQESFSIQYLNDCLRAYGKTENIQDYFAKLGAVNNEHEQTINLFAQVRNAYTSVQAILTTPYPENANLAQDKETVALIKNLLDSLKRLQRFIKPLLGKGDESDKDERFYGDFTPLWETLNQITPLYNMVRNYMTRKPYSQEKIKLNFENSTLLGGWDLNKEHDNTAIILRKNGLYYLAIMKKSANKIFDKDKLDNSGDCYEKMVYKLLPGANKMLPKVFFSKSRIDEFKPSENIIENYKKGTHKKGANFNLADCHNLIDFFKSSISKHEDWSKFNFHFSDTSSYEDLSDFYREVEQQGYSISFCDVSVEYINKMVEKGDLYLFQIYNKDFSEFSKGTPNMHTLYWNSLFSKENLNNIIYKLNGQAEIFFRKKSLNYKRPTHPAHQAIKNKNKCNEKKESIFDYDLVKDKRYTVDKFQFHVPITMNFKSTGNTNINQQVIDYLRTEDDTHIIGIDRGERHLLYLVVIDSHGKIVEQFTLNEIVNEYGGNIYRTNYHDLLDTREQNREKARESWQTIENIKELKEGYISQVIHKITDLMQKYHAVVVLEDLNMGFMRGRQKVEKQVYQKFEEMLINKLNYLVNKKADQNSAGGLLHAYQLTSKFESFQKLGKQSGFLFYIPAWNTSKIDPVTGFVNLFDTRYESIDKAKAFFGKFDSIRYNADKDWFEFAFDYNNFTTKAEGTRTNWTICTYGSRIRTFRNQAKNSQWDNEEIDLTKAYKAFFAKHGINIYDNIKEAIAMETEKSFFEDLLHLLKLTLQMRNSITGTTTDYLISPVHDSKGNFYDSRICDNSLPANADANGAYNIARKGLMLIQQIKDSTSSNRFKFSPITNKDWLIFAQEKPYLND

SEQ ID NO: 11 - protein, 1230 aa, Lachnospiraceae bacterium COE1
  MISC_FEATURE (1)..(1249): COE1Cpf1Q161R
  MISC_FEATURE (170)..(170): Q161R
MHENNGKIADNFIGIYPVSKTLRFELKPVGKTQEYIEKHGILDEDLKRAGDYKSVKKIIDAYHKYFIDEALNGIQLDGLKNYYELYEKKRDNNEEKEFQKIQMSLRKQIVKRFSEHPQYKYLFKKELIKNVLPEFTKDNAEEQTLVKSFQEFTTYFEGFHRNRKNMYSDEEKSTAIAYRVVHQNLPKYIDNMRIFSMILNTDIRSDLTELFNNLKTKMDITIVEEYFAIDGFNKVVNQKGIDVYNTILGAFSTDDNTKIKGLNEYINLYNQKNKAKLPKLKPLFKQILSDRDKISFIPEQFDSDTEVLEAVDMFYNRLLQFVIENEGQITISKLLTNFSAYDLNKIYVKNDTTISAISNDLFDDWSYISKAVRENYDSENVDKNKRAAAYEEKKEKALSKIKMYSIEELNFFVKKYSCNECHIEGYFERRILEILDKMRYAYESCKILHDKGLINNISLCQDRQAISELKDFLDSIKEVQWLLKPLMIGQEQADKEEAFYTELLRIWEELEPITLLYNKVRNYVTKKPYTLEKVKLNFYKSTLLDGWDKNKEKDNLGIILLKDGQYYLGIMNRRNNKIADDAPLAKTDNVYRKMEYKLLTKVSANLPRIFLKDKYNPSEEMLEKYEKGTHLKGENFCIDDCRELIDFFKKGIKQYEDWGQFDFKFSDTESYDDISAFYKEVEHQGYKITFRDIDETYIDSLVNEGKLYLFQIYNKDFSPYSKGTKNLHTLYWEMLFSQQNLQNIVYKLNGNAEIFYRKASINQKDVVVHKADLPIKNKDPQNSKKESMFDYDIIKDKRFTCDKYQFHVPITMNFKALGENHFNRKVNRLIHDAENMHIIGIDRGERNLIYLCMIDMKGNIVKQISLNEIISYDKNKLEHKRNYHQLLKTREDENKSARQSWQTIHTIKELKEGYLSQVIHVITDLMVEYNAIVVLEDLNFGFKQGRQKFERQVYQKFEKMLIDKLNYLVDKSKGMDEDGGLLHAYQLTDEFKSFKQLGKQSGFLYYIPAWNTSKLDPTTGFVNLFYTKYESVEKSKEFINNFTSILYNQEREYFEFLFDYSAFTSKAEGSRLKWTVCSKGERVETYRNPKKNNEWDTQKIDLTFELKKLFNDYSISLLDGDLREQMGKIDKADFYKKFMKLFALIVQMRNSDEREDKLISPVLNKYGAFFETGKNERMPLDADANGAYNIARKGLWIIEKIKNTDVEQLDKVKLTISNKEWLQYAQEHIL

SEQ ID NO: 12 - DNA, 14 bp, Artificial Sequence
  Cpf1 guide RNA
  misc_feature (1)..(14): Cpf1 guide RNA hairpin; n=any nucleotide
tctacnnngtagat

SEQ ID NO: 13 - DNA, 15 bp, Artificial Sequence
  Cpf1 guide RNA
  misc_feature (1)..(15): Cpf1 guide RNA hairpin; n=any nucleotide
tctacnnnngtagat

SEQ ID NO: 14 - DNA, 16 bp, Artificial Sequence
  Cpf1 guide RNA
  misc_feature (1)..(16): Cpf1 guide RNA hairpin; n=any nucleotide
tctacnnnnngtagat

SEQ ID NO: 15 - RNA, 14 nt, Artificial Sequence
  Cpf1 guide RNA
  misc_feature (1)..(14): Cpf1 guide RNA hairpin; n=any nucleotide
ucuacnnnguagau

SEQ ID NO: 16 - RNA, 15 nt, Artificial Sequence
  Cpf1 guide RNA
  misc_feature (1)..(15): Cpf1 guide RNA hairpin; n=any nucleotide
ucuacnnnnguagau

SEQ ID NO: 17 - RNA, 16 nt, Artificial Sequence
  Cpf1 guide RNA
  misc_feature (1)..(16): Cpf1 guide RNA hairpin; n=any nucleotide
ucuacnnnnnguagau

SEQ ID NO: 18 - DNA, 1644 bp, Oryza sativa
  misc_feature (1)..(1644): CAO1 gene fragment used for in vitro assays
ccccgcaagtatttgtattcactaaactttcgtaaacgaaacttgcaaaacacatcaaaccggtcaaatttggacagaaaattcagccgagatcgcaaatattcgtttcaaaacaaattactgtaaccggcgacgcagccacgggacgtggatcggacggcgcggaggtggacggaggagggatcaacggctgagatgcgttcctgcgtgccacgtggtgcgccgcgagcagataagggttcagggcgtcgcgacggggtcgagagataaggggcgcgcggcgagtggcgcgccacgtcgcgtggcccagattgcgttctccggattagagatttcgaaatatcttttcgcggagaaagaaaaaaaaattagacaaaaccaccctcggttgaggaaaaatatggggagtatttgtgcgtttttatttttgtttttgggtcgcactgttcgatcgtagcatccatgaccactgtggcatcgctgtctttgctgccgcacttgctcatcaagccttccttcaggtgttgctccagaaaggtgagttcttcttgttgttccttgaatctgtttttgttgttgttgtttggcgattcttatctttctagaagatctcctacaatattctcagctgccatggaaaatcgatgttcttcttttattctctcaagattttcaggctgtatattaaaacttatattaagaactatgctaaccacctcatcaggaaccgttgtaggtggcgtgggttttcttggcaatcgactctcatgaaaactacgagctaaatattcaatatgttcctcttgaccaactttattctgcattttttttgaacgaggtttagagcaagcttcaggaaactgagacaggaattttattaaaaatttaaattttgaagaaagttcagggttaatagcatccattttttgctttgcaagttcctcagcattcttaacaaaagacgtctcttttgacatgtttaaagtttaaacctcctgtgtgaaattattatccgctcataattccacacattatacgagccggaagcataaagtgtaaagcctggggtgcctaatgagtgagctaactcacattaattgcgttgcgctcactgccaattgctttccagtcgggaaacctgtcgtgccagctgcattaatgaatcggccaacgcgcggggagaggcggtttgcgtattgggcgctcttccgcttcctcgctcactgactcgctgcgctcggtcgttcggctgcggcgagcggtatcagctcactcaaaggcggtaatacggttatccacagaatcaggggataacgcaggaaagaacatgtgagcaaaaggccagcaaaaggccaggaaccgtaaaaaggccgcgttgctggcgtttttccataggctccgcccccctgacgagcatcacaaaaatcgacgctcaagtcagaggtggcgaaacccgacaggactataaagataccaggcgtttccccctggaagctccctcgtgcgctctcctgttccgaccctgccgcttaccggatacctgtccgcctttctcccttcgggaagcgtggcgctttctcatagctcacgctgtaggtatctcagttcggtgtaggtcgttcgctccaagctgggctgtgtgca

SEQ ID NO: 19 - RNA, 44 nt, Artificial Sequence
  Cpf1 guide RNA
  misc_feature (1)..(44): gRNA targeting CAO1
  misc_feature (1)..(20): gRNA hairpin
  misc_feature (21)..(44): gRNA targeting sequence
uaauuucuacuguuguagauuggagcaacaccugaaggaaggcu

SEQ ID NO: 20 - DNA, 7678 bp, Artificial Sequence
  plant transformation vector
  misc_feature (1)..(7678): Plant transformation vector
  misc_feature (465)..(1525): AtUbi11 promoter
  misc_feature (1534)..(5334): Pb2Cpf1 CDS
  misc_feature (5370)..(5619): HSP terminator
ctaaattgtaagcgttaatattttgttaaaattcgcgttaaatttttgttaaatcagctcattttttaaccaataggccgaaatcggcaaaatcccttataaatcaaaagaatagaccgagatagggttgagtggccgctacagggcgctcccattcgccattcaggctgcgcaactgttgggaagggcgtttcggtgcgggcctcttcgctattacgccagctggcgaaagggggatgtgctgcaaggcgattaagttgggtaacgccagggttttcccagtcacgacgttgtaaaacgacggccagtgagcgcgacgtaatacgactcactatagggcgaattggcggaaggccgtcaaggccgcatcccgggttgtagctccacgcgcttcggcaggggaagctctacttaatcggaagtccatatgtaactataacggtcctaaggtagcgagcgatcgcttgcaaacagaggagatatactaagcctttggaagagtgtatagatgagctagaactctacacacttggtcaatactagatttatctgcatcaaatgctttccaccagggtggattctctgggagaggtacttgaaacctacgtgcagcagcatacacgaccccacaagccagaacctcacttctgaaccttacacaaagggttgtacgcagactatcattagccaaattccaagcttcttgcctcaattccggaggtgtttctagtgttcaacatgacaaacaaaacccatctctttcagtatatgtctctcagttgtgcttaattcaaatttcaactcagagaacttcttggcatacttatccagattatctaatgatctcatctaatggtaattcaactttcagtataagtctcgcagcaaactatctttacatcaaatttttaacaactcaatgcacaaaatacttttcctcaacctaaaaataaggcaattagccaaaaacaactttgcgtgtgaacaacgcgtacacgtccctacacatacctgtcaatttataattggctattgcttccacgccttagctttctcgtgaccgaccgagtcgtcctcgtcttttttgcttctataaatcaaatacccaaagagctcttcttcttcacaattcagattccaattttctcaaactctaaaatcaatctctcaaatctctcaaccgtgatcaaggtagatttctgagttcttattgtatttcttcgatttgtttcgttcgatcgcaatttaggctctgttctttgattttgatctcgttaatctctgatcggaggcaaattacatagtttcatcgttagatctcttcttatttctcgattagggttcgtatttttcgcagatctgtttattttcttgttgtttccttgtatttgatccgatttgttgaaagaatttgtgtgttctcgattatttacgctttgatctgtgatttttatctagatttggtgttagtttcttgtttgtgcgatcgaatttgtcgattaatctcggtttatctgattaacaggtttaaacatggccccaaagaaaaagcgcaaggtgatgcagatcaacaacctcaagatcatctacatgaagttcaccgactttaccggcctctacagcctttctaagaccctcagattcgagcttaagcccatcggaaagaccctcgagaatatcaagaaggctggactccttgagcaggatcagcatagggctgactcttacaagaaggtgaagaagatcatcgacgagtaccacaaggccttcatcgagaagtccctcagcaacttcgagctgaagtaccagtccgaggataagctcgattccctcgaagagtacctcatgtactactccatgaagcgcatcgagaaaaccgagaaggacaagttcgctaagatccaggacaacctgaggaagcagattgctgatcacctcaagggtgacgagtcctacaagaccatcttctccaaggacctcatccgcaagaaccttccagacttcgtgaagtccgatgaagagaggaccctcatcaaagagttcaaggacttcaccacctacttcaagggcttctacgagaaccgcgagaacatgtactctgccgaggacaagtctaccgctatctcccacaggattatccacgagaacctgccaaagttcgtggacaacatcaacgccttctctaagatcattctcatccccgagcttcgcgagaagctgaaccagatctatcaggacttcgaggaatacctcaacgtcgagtccatcgatgagatcttccacctcgactacttctccatggtgatgacccagaagcagatcgaggtttacaacgctatcatcggcgggaagtccaccaacgataagaagattcagggcctcaacgagtacatcaacctctacaaccagaagcacaaggactgcaagctccccaagctcaagcttctgttcaagcagatcctctccgataggatcgctatctcttggctcccagacaacttcaaggatgatcaagaggccctcgacagcatcgatacctgctacaagaacctcctcaacgatggaaacgttctcggagagggaaaccttaagctcctgctcgagaacatcgacacctacaaccttaagggcatcttcatccgtaacgacctccagctcaccgacatctctcaaaagatgtacgcctcctggaacgtgatccaggatgctgtgattctcgacctcaagaagcaagtctcccgcaagaagaaagagtccgctgaggattacaacgaccgcctgaagaagctctacaccagccaagagtccttcagcatccagtaccttaacgattgcctccgcgcttacggaaagactgagaacatccaggattacttcgctaagctcggcgctgttaacaacgagcatgagcagaccattaacctcttcgctcaggtgaggaacgcttacacttctgtgcaggctattctcactaccccatatccagagaacgctaacctcgctcaggacaaagagactgtcgccctgattaagaacctgctcgactcccttaagaggctccagcgctttattaagccactcctcggaaagggtgatgagagcgataaggatgagaggttctacggcgatttcaccccactttgggagactctcaaccagattaccccactctacaacatggtccgcaactacatgactcgcaagccctactctcaagagaagattaagctgaacttcgagaacagcaccctcctcggaggatgggatttgaacaaagagcacgataacaccgccatcatcctcagaaagaacgggctttactacctcgccatcatgaagaagtccgccaacaagatcttcgacaaggacaagctcgacaactccggtgattgctacgaaaagatggtgtacaagcttctcccaggcgctaacaagatgctcccaaaggtgttcttcagcaagtcccgcattgacgagttcaagccctcagagaacattatcgaaaactataagaagggcacccacaagaagggcgccaacttcaaccttgctgattgccacaacctcatcgatttcttcaagtcctccatctccaagcacgaggattggtccaagttcaacttccacttctccgacaccagctcctacgaggatctctctgatttctaccgcgaggttgagcagcagggctactccatttctttctgtgatgtgtccgtcgagtatatcaacaagatggtcgagaagggcgacctctacctcttccagatctacaacaaggatttctccgagttcagcaagggcactccaaacatgcataccctctactggaacagcctgttctccaaagagaacctcaacaacattatctacaagctcaacggccaggccgagatcttctttaggaagaagtctctcaactacaagcgcccaactcacccagctcatcaggctatcaagaacaagaacaaatgcaacgaaaagaaagaatccatcttcgactacgacctcgtgaaggataagaggtacaccgtcgacaagttccagttccacgtgccaatcaccatgaacttcaagagcaccggcaacaccaacattaaccagcaggttatcgactacctcaggaccgaggatgatacccacatcatcggaattgatagaggcgagaggcaccttctttacctcgtggtgattgattcccacggcaagatcgttgagcagttcacccttaacgagatcgtgaacgagtacggcggaaacatctacaggaccaactaccacgatctcctcgataccagagagcagaacagagagaaggctagagagtcttggcagaccatcgaaaacatcaaagaactcaaagagggctacatctcccaggtgatccacaagattaccgacctcatgcagaagtaccacgccgttgttgtgcttgaggatctcaacatgggattcatgagaggcaggcagaaggtggaaaagcaggtctaccaaaagttcgaagagatgctcatcaacaagctaaactacctggtgaacaagaaggccgaccagaactctgctggtggattgcttcatgcttaccagctgacctccaagttcgagtccttccagaagttgggtaagcagtccggcttcctcttctacattcctgcttggaacaccagcaagatcgatccagttaccggattcgtgaacctgttcgacactcgctacgagtccattgataaggctaaggccttcttcggcaagttcgactccattaggtacaacgccgataaggactggttcgagttcgctttcgactacaacaacttcactaccaaggctgaaggcaccaggactaactggactatctgcacttacggctctcgcatcaggaccttcagaaaccaggctaagaactcccagtgggacaacgaggaaatcgatctcaccaaggcctacaaggctttcttcgcaaagcacggcatcaacatctacgacaatatcaaagaggctatcgccatggaaactgagaagagtttcttcgaggacctcctccacctccttaagcttactcttcagatgcgcaactccatcactggaaccaccaccgattacctcatttccccagtgcacgattccaagggcaacttctacgattccaggatctgcgacaactctctcccagctaacgctgatgctaacggcgcttacaacattgctagaaagggcctcatgctcattcagcagatcaaggacagcaccagcagcaaccgtttcaagttctccccaattaccaacaaagactggctcatcttcgcccaagagaagccatacttgaacgactgacggaccgtgacgatcaaccataccagaggcgcgccatatgaagatgaagatgaaatatttggtgtgtcaaataaaaagcttgtgtgcttaagtttgtgtttttttcttggcttgttgtgttatgaatttgtggctttttctaatattaaatgaatgtaagatctcattataatgaataaacaaatgtttctataatccattgtgaatgttttgttggatctcttctgcagcatataactactgtatgtgctatggtatggactatggaatatgattaaagataaggcggccgcattaccctgttatccctaaagcttgaattcagtacattaaaaacgtccgcaatgtgttattaagttgtctaagcccgggctgggcctcatgggccttccgctcactgcccgctttccagtcgggaaacctgtcgtgccagctgcattaacatggtcatagctgtttccttgcgtattgggcgctctccgcttcctcgctcactgactcgctgcgctcggtcgttcgggtaaagcctggggtgcctaatgagcaaaaggccagcaaaaggccaggaaccgtaaaaaggccgcgttgctggcgtttttccataggctccgcccccctgacgagcatcacaaaaatcgacgctcaagtcagaggtggcgaaacccgacaggactataaagataccaggcgtttccccctggaagctccctcgtgcgctctcctgttccgaccctgccgcttaccggatacctgtccgcctttctcccttcgggaagcgtggcgctttctcatagctcacgctgtaggtatctcagttcggtgtaggtcgttcgctccaagctgggctgtgtgcacgaaccccccgttcagcccgaccgctgcgccttatccggtaactatcgtcttgagtccaacccggtaagacacgacttatcgccactggcagcagccactggtaacaggattagcagagcgaggtatgtaggcggtgctacagagttcttgaagtggtggcctaactacggctacactagaagaacagtatttggtatctgcgctctgctgaagccagttaccttcggaaaaagagttggtagctcttgatccggcaaacaaaccaccgctggtagcggtggtttttttgtttgcaagcagcagattacgcgcagaaaaaaaggatctcaagaagatcctttgatcttttctacggggtctgacgctcagtggaacgaaaactcacgttaagggattttggtcatgagattatcaaaaaggatcttcacctagatccttttaaattaaaaatgaagttttaaatcaatctaaagtatatatgagtaaacttggtctgacagttaccaatgcttaatcagtgaggcacctatctcagcgatctgtctatttcgttcatccatagttgcctgactccccgtcgtgtagataactacgatacgggagggcttaccatctggccccagtgctgcaatgataccgcgagaaccacgctcaccggctccagatttatcagcaataaaccagccagccggaagggccgagcgcagaagtggtcctgcaactttatccgcctccatccagtctattaattgttgccgggaagctagagtaagtagttcgccagttaatagtttgcgcaacgttgttgccattgctacaggcatcgtggtgtcacgctcgtcgtttggtatggcttcattcagctccggttcccaacgatcaaggcgagttacatgatcccccatgttgtgcaaaaaagcggttagctccttcggtcctccgatcgttgtcagaagtaagttggccgcagtgttatcactcatggttatggcagcactgcataattctcttactgtcatgccatccgtaagatgcttttctgtgactggtgagtactcaaccaagtcattctgagaatagtgtatgcggcgaccgagttgctcttgcccggcgtcaatacgggataataccgcgccacatagcagaactttaaaagtgctcatcattggaaaacgttcttcggggcgaaaactctcaaggatcttaccgctgttgagatccagttcgatgtaacccactcgtgcacccaactgatcttcagcatcttttactttcaccagcgtttctgggtgagcaaaaacaggaaggcaaaatgccgcaaaaaagggaataagggcgacacggaaatgttgaatactcatactcttcctttttcaatattattgaagcatttatcagggttattgtctcatgagcggatacatatttgaatgtatttagaaaaataaacaaataggggttccgcgcacatttccccgaaaagtgccac

SEQ ID NO: 21 - DNA, 7678 bp, Artificial Sequence
  plant transformation vector
  misc_feature (1)..(7678): plant transformation vector
  misc_feature (465)..(1525): AtUbi11 promoter
  misc_feature (1534)..(5334): Pb2E173R coding sequence
  misc_feature (5370)..(5619): HSP terminator
ctaaattgtaagcgttaatattttgttaaaattcgcgttaaatttttgttaaatcagctcattttttaaccaataggccgaaatcggcaaaatcccttataaatcaaaagaatagaccgagatagggttgagtggccgctacagggcgctcccattcgccattcaggctgcgcaactgttgggaagggcgtttcggtgcgggcctcttcgctattacgccagctggcgaaagggggatgtgctgcaaggcgattaagttgggtaacgccagggttttcccagtcacgacgttgtaaaacgacggccagtgagcgcgacgtaatacgactcactatagggcgaattggcggaaggccgtcaaggccgcatcccgggttgtagctccacgcgcttcggcaggggaagctctacttaatcggaagtccatatgtaactataacggtcctaaggtagcgagcgatcgcttgcaaacagaggagatatactaagcctttggaagagtgtatagatgagctagaactctacacacttggtcaatactagatttatctgcatcaaatgctttccaccagggtggattctctgggagaggtacttgaaacctacgtgcagcagcatacacgaccccacaagccagaacctcacttctgaaccttacacaaagggttgtacgcagactatcattagccaaattccaagcttcttgcctcaattccggaggtgtttctagtgttcaacatgacaaacaaaacccatctctttcagtatatgtctctcagttgtgcttaattcaaatttcaactcagagaacttcttggcatacttatccagattatctaatgatctcatctaatggtaattcaactttcagtataagtctcgcagcaaactatctttacatcaaatttttaacaactcaatgcacaaaatacttttcctcaacctaaaaataaggcaattagccaaaaacaactttgcgtgtgaacaacgcgtacacgtccctacacatacctgtcaatttataattggctattgcttccacgccttagctttctcgtgaccgaccgagtcgtcctcgtcttttttgcttctataaatcaaatacccaaagagctcttcttcttcacaattcagattccaattttctcaaactctaaaatcaatctctcaaatctctcaaccgtgatcaaggtagatttctgagttcttattgtatttcttcgatttgtttcgttcgatcgcaatttaggctctgttctttgattttgatctcgttaatctctgatcggaggcaaattacatagtttcatcgttagatctcttcttatttctcgattagggttcgtatttttcgcagatctgtttattttcttgttgtttccttgtatttgatccgatttgttgaaagaatttgtgtgttctcgattatttacgctttgatctgtgatttttatctagatttggtgttagtttcttgtttgtgcgatcgaatttgtcgattaatctcggtttatctgattaacaggtttaaacatggccccaaagaaaaagcgcaaggtgatgcagatcaacaacctcaagatcatctacatgaagttcaccgactttaccggcctctacagcctttctaagaccctcagattcgagcttaagcccatcggaaagaccctcgagaatatcaagaaggctggactccttgagcaggatcagcatagggctgactcttacaagaaggtgaagaagatcatcgacgagtaccacaaggccttcatcgagaagtccctcagcaacttcgagctgaagtaccagtccgaggataagctcgattccctcgaagagtacctcatgtactactccatgaagcgcatcgagaaaaccgagaaggacaagttcgctaagatccaggacaacctgaggaagcagattgctgatcacctcaagggtgacgagtcctacaagaccatcttctccaaggacctcatccgcaagaaccttccagacttcgtgaagtccgatgaagagaggaccctcatcaaagagttcaaggacttcaccacctacttcaagggcttctacagaaaccgcgagaacatgtactctgccgaggacaagtctaccgctatctcccacaggattatccacgagaacctgccaaagttcgtggacaacatcaacgccttctctaagatcattctcatccccgagcttcgcgagaagctgaaccagatctatcaggacttcgaggaatacctcaacgtcgagtccatcgatgagatcttccacctcgactacttctccatggtgatgacccagaagcagatcgaggtttacaacgctatcatcggcgggaagtccaccaacgataagaagattcagggcctcaacgagtacatcaacctctacaaccagaagcacaaggactgcaagctccccaagctcaagcttctgttcaagcagatcctctccgataggatcgctatctcttggctcccagacaacttcaaggatgatcaagaggccctcgacagcatcgatacctgctacaagaacctcctcaacgatggaaacgttctcggagagggaaaccttaagctcctgctcgagaacatcgacacctacaaccttaagggcatcttcatccgtaacgacctccagctcaccgacatctctcaaaagatgtacgcctcctggaacgtgatccaggatgctgtgattctcgacctcaagaagcaagtctcccgcaagaagaaagagtccgctgaggattacaacgaccgcctgaagaagctctacaccagccaagagtccttcagcatccagtaccttaacgattgcctccgcgcttacggaaagactgagaacatccaggattacttcgctaagctcggcgctgttaacaacgagcatgagcagaccattaacctcttcgctcaggtgaggaacgcttacacttctgtgcaggctattctcactaccccatatccagagaacgctaacctcgctcaggacaaagagactgtcgccctgattaagaacctgctcgactcccttaagaggctccagcgctttattaagccactcctcggaaagggtgatgagagcgataaggatgagaggttctacggcgatttcaccccactttgggagactctcaaccagattaccccactctacaacatggtccgcaactacatgactcgcaagccctactctcaagagaagattaagctgaacttcgagaacagcaccctcctcggaggatgggatttgaacaaagagcacgataacaccgccatcatcctcagaaagaacgggctttactacctcgccatcatgaagaagtccgccaacaagatcttcgacaaggacaagctcgacaactccggtgattgctacgaaaagatggtgtacaagcttctcccaggcgctaacaagatgctcccaaaggtgttcttcagcaagtcccgcattgacgagttcaagccctcagagaacattatcgaaaactataagaagggcacccacaagaagggcgccaacttcaaccttgctgattgccacaacctcatcgatttcttcaagtcctccatctccaagcacgaggattggtccaagttcaacttccacttctccgacaccagctcctacgaggatctctctgatttctaccgcgaggttgagcagcagggctactccatttctttctgtgatgtgtccgtcgagtatatcaacaagatggtcgagaagggcgacctctacctcttccagatctacaacaaggatttctccgagttcagcaagggcactccaaacatgcataccctctactggaacagcctgttctccaaagagaacctcaacaacattatctacaagctcaacggccaggccgagatcttctttaggaagaagtctctcaactacaagcgcccaactcacccagctcatcaggctatcaagaacaagaacaaatgcaacgaaaagaaagaatccatcttcgactacgacctcgtgaaggataagaggtacaccgtcgacaagttccagttccacgtgccaatcaccatgaacttcaagagcaccggcaacaccaacattaaccagcaggttatcgactacctcaggaccgaggatgatacccacatcatcggaattgatagaggcgagaggcaccttctttacctcgtggtgattgattcccacggcaagatcgttgagcagttcacccttaacgagatcgtgaacgagtacggcggaaacatctacaggaccaactaccacgatctcctcgataccagagagcagaacagagagaaggctagagagtcttggcagaccatcgaaaacatcaaagaactcaaagagggctacatctcccaggtgatccacaagattaccgacctcatgcagaagtaccacgccgttgttgtgcttgaggatctcaacatgggattcatgagaggcaggcagaaggtggaaaagcaggtctaccaaaagttcgaagagatgctcatcaacaagctaaactacctggtgaacaagaaggccgaccagaactctgctggtggattgcttcatgcttaccagctgacctccaagttcgagtccttccagaagttgggtaagcagtccggcttcctcttctacattcctgcttggaacaccagcaagatcgatccagttaccggattcgtgaacctgttcgacactcgctacgagtccattgataaggctaaggccttcttcggcaagttcgactccattaggtacaacgccgataaggactggttcgagttcgctttcgactacaacaacttcactaccaaggctgaaggcaccaggactaactggactatctgcacttacggctctcgcatcaggaccttcagaaaccaggctaagaactcccagtgggacaacgaggaaatcgatctcaccaaggcctacaaggctttcttcgcaaagcacggcatcaacatctacgacaatatcaaagaggctatcgccatggaaactgagaagagtttcttcgaggacctcctccacctccttaagcttactcttcagatgcgcaactccatcactggaaccaccaccgattacctcatttccccagtgcacgattccaagggcaacttctacgattccaggatctgcgacaactctctcccagctaacgctgatgctaacggcgcttacaacattgctagaaagggcctcatgctcattcagcagatcaaggacagcaccagcagcaaccgtttcaagttctccccaattaccaacaaagactggctcatcttcgcccaagagaagccatacttgaacgactgacggaccgtgacgatcaaccataccagaggcgcgccatatgaagatgaagatgaaatatttggtgtgtcaaataaaaagcttgtgtgcttaagtttgtgtttttttcttggcttgttgtgttatgaatttgtggctttttctaatattaaatgaatgtaagatctcattataatgaataaacaaatgtttctataatccattgtgaatgttttgttggatctcttctgcagcatataactactgtatgtgctatggtatggactatggaatatgattaaagataaggcggccgcattaccctgttatccctaaagcttgaattcagtacattaaaaacgtccgcaatgtgttattaagttgtctaagcccgggctgggcctcatgggccttccgctcactgcccgctttccagtcgggaaacctgtcgtgccagctgcattaacatggtcatagctgtttccttgcgtattgggcgctctccgcttcctcgctcactgactcgctgcgctcggtcgttcgggtaaagcctggggtgcctaatgagcaaaaggccagcaaaaggccaggaaccgtaaaaaggccgcgttgctggcgtttttccataggctccgcccccctgacgagcatcacaaaaatcgacgctcaagtcagaggtggcgaaacccgacaggactataaagataccaggcgtttccccctggaagctccctcgtgcgctctcctgttccgaccctgccgcttaccggatacctgtccgcctttctcccttcgggaagcgtggcgctttctcatagctcacgctgtaggtatctcagttcggtgtaggtcgttcgctccaagctgggctgtgtgcacgaaccccccgttcagcccgaccgctgcgccttatccggtaactatcgtcttgagtccaacccggtaagacacgacttatcgccactggcagcagccactggtaacaggattagcagagcgaggtatgtaggcggtgctacagagttcttgaagtggtggcctaactacggctacactagaagaacagtatttggtatctgcgctctgctgaagccagttaccttcggaaaaagagttggtagctcttgatccggcaaacaaaccaccgctggtagcggtggtttttttgtttgcaagcagcagattacgcgcagaaaaaaaggatctcaagaagatcctttgatcttttctacggggtctgacgctcagtggaacgaaaactcacgttaagggattttggtcatgagattatcaaaaaggatcttcacctagatccttttaaattaaaaatgaagttttaaatcaatctaaagtatatatgagtaaacttggtctgacagttaccaatgcttaatcagtgaggcacctatctcagcgatctgtctatttcgttcatccatagttgcctgactccccgtcgtgtagataactacgatacgggagggcttaccatctggccccagtgctgcaatgataccgcgagaaccacgctcaccggctccagatttatcagcaataaaccagccagccggaagggccgagcgcagaagtggtcctgcaactttatccgcctccatccagtctattaattgttgccgggaagctagagtaagtagttcgccagttaatagtttgcgcaacgttgttgccattgctacaggcatcgtggtgtcacgctcgtcgtttggtatggcttcattcagctccggttcccaacgatcaaggcgagttacatgatcccccatgttgtgcaaaaaagcggttagctccttcggtcctccgatcgttgtcagaagtaagttggccgcagtgttatcactcatggttatggcagcactgcataattctcttactgtcatgccatccgtaagatgcttttctgtgactggtgagtactcaaccaagtcattctgagaatagtgtatgcggcgaccgagttgctcttgcccggcgtcaatacgggataataccgcgccacatagcagaactttaaaagtgctcatcattggaaaacgttcttcggggcgaaaactctcaaggatcttaccgctgttgagatccagttcgatgtaacccactcgtgcacccaactgatcttcagcatcttttactttcaccagcgtttctgggtgagcaaaaacaggaaggcaaaatgccgcaaaaaagggaataagggcgacacggaaatgttgaatactcatactcttcctttttcaatattattgaagcatttatcagggttattgtctcatgagcggatacatatttgaatgtatttagaaaaataaacaaataggggttccgcgcacatttccccgaaaagtgccac

SEQ ID NO: 22 - DNA, 7699 bp, Artificial Sequence
  plant transformation vector
  misc_feature (1)..(7699): plant transformation vector
  misc_feature (465)..(1525): AtUbi11 promoter
  misc_feature (1534)..(5355): McCpf1 coding sequence
  misc_feature (5391)..(5640): HSP terminator
ctaaattgtaagcgttaatattttgttaaaattcgcgttaaatttttgttaaatcagctcattttttaaccaataggccgaaatcggcaaaatcccttataaatcaaaagaatagaccgagatagggttgagtggccgctacagggcgctcccattcgccattcaggctgcgcaactgttgggaagggcgtttcggtgcgggcctcttcgctattacgccagctggcgaaagggggatgtgctgcaaggcgattaagttgggtaacgccagggttttcccagtcacgacgttgtaaaacgacggccagtgagcgcgacgtaatacgactcactatagggcgaattggcggaaggccgtcaaggccgcatcccgggttgtagctccacgcgcttcggcaggggaagctctacttaatcggaagtccatatgtaactataacggtcctaaggtagcgagcgatcgcttgcaaacagaggagatatactaagcctttggaagagtgtatagatgagctagaactctacacacttggtcaatactagatttatctgcatcaaatgctttccaccagggtggattctctgggagaggtacttgaaacctacgtgcagcagcatacacgaccccacaagccagaacctcacttctgaaccttacacaaagggttgtacgcagactatcattagccaaattccaagcttcttgcctcaattccggaggtgtttctagtgttcaacatgacaaacaaaacccatctctttcagtatatgtctctcagttgtgcttaattcaaatttcaactcagagaacttcttggcatacttatccagattatctaatgatctcatctaatggtaattcaactttcagtataagtctcgcagcaaactatctttacatcaaatttttaacaactcaatgcacaaaatacttttcctcaacctaaaaataaggcaattagccaaaaacaactttgcgtgtgaacaacgcgtacacgtccctacacatacctgtcaatttataattggctattgcttccacgccttagctttctcgtgaccgaccgagtcgtcctcgtcttttttgcttctataaatcaaatacccaaagagctcttcttcttcacaattcagattccaattttctcaaactctaaaatcaatctctcaaatctctcaaccgtgatcaaggtagatttctgagttcttattgtatttcttcgatttgtttcgttcgatcgcaatttaggctctgttctttgattttgatctcgttaatctctgatcggaggcaaattacatagtttcatcgttagatctcttcttatttctcgattagggttcgtatttttcgcagatctgtttattttcttgttgtttccttgtatttgatccgatttgttgaaagaatttgtgtgttctcgattatttacgctttgatctgtgatttttatctagatttggtgttagtttcttgtttgtgcgatcgaatttgtcgattaatctcggtttatctgattaacaggtttaaacatggccccaaagaaaaagcgcaaggtgatgctgttccaggacttcacccatctctacccactctcaaagaccatgcgcttcgagcttaagccaatcggaaagacccttgagcacatccacgccaagaactttttgtcccaggatgagactatggccgacatgtaccagaaggtgaaggctatcctcgatgactaccacagggatttcattgccgacatgatgggcgaagtgaagcttaccaagctcgccgagttctacgatgtgtacctcaagttccgcaagaacccaaaggatgatggactccagaagcagctcaaggatcttcaggctgtgctgcgcaaagagatcgttaagcctattggaaacggcggcaagtacaaggctggatacgatagacttttcggcgccaagcttttcaaggacggaaaagagcttggcgacctcgctaagttcgtgattgctcaagaaggcgagtcctctccaaagcttgctcatttggctcacttcgagaagttctccacctacttcaccggcttccacgacaaccgtaagaacatgtactccgacgaggataagcacaccgctattacctacaggctcatccacgagaacctgccacgcttcattgataacctccagatcctcgctaccatcaagcaaaagcactctgccctctacgaccagatcatcaacgagcttactgcctccggacttgatgtgtctcttgcttctcacctcgacggctaccataagcttttgacccaagagggcattaccgcctacaacactcttctcggaggaatttctggtgaggctggctctaggaagatccagggtattaacgaactcatcaactcccaccacaaccagcactgccataagtctgagaggattgctaagctcaggccactccacaagcagatcctttctgatggaatgggcgtgtccttcctgccatcaaagttcgctgatgactctgagatgtgccaggctgtgaacgagttctataggcactacgctgatgtgttcgccaaggtgcagtctctcttcgatggattcgatgaccaccaaaaggacggcatctacgtcgagcacaagaacctcaacgagttgtccaagcaggctttcggagatttcgctctccttggaagagtgctggatggctactatgtggatgttgtgaaccccgagttcaacgagagattcgctaaggctaagaccgataacgctaaggccaagctcaccaaagagaaggacaagttcatcaagggcgtgcactcactcgcttctctcgaacaagctattgagcactacaccgctaggcacgatgatgagtctgttcaggctggaaagctcggccaatatttcaagcacggacttgctggtgtggacaacccaattcagaagatccacaacaaccactccaccatcaagggattccttgagagagaaagaccagctggcgaaagggctctcccaaagattaagtctggaaagaacccagagatgacccagctcaggcagcttaaagagcttcttgacaacgctcttaacgtggcccacttcgctaagcttctcactaccaagaccactctcgataaccaggacggtaacttctacggtgagttcggtgctctctacgatgagcttgctaagatccccaccttgtacaacaaggtgagggactaccttagccagaagccattctctaccgagaagtacaagctcaacttcggcaacccaaccttgctcaacggatgggatctcaacaaagaaaaggataacttcgggatcatcctccagaaggacggttgctactaccttgctttgctcgataaggcccacaagaaggtgttcgataacgcaccaaacaccggcaagaacgtctaccagaagatgatctacaagctgctccccggaccaaacaagatgcttccaaaggtgttcttcgccaagtccaacctcgactactacaacccttctgctgagctgttggataagtacgctcagggcactcataagaagggcaacaacttcaacctcaaggactgccacgcactcatcgatttcttcaaggccggaatcaacaagcacccagagtggcaacatttcggcttcaagttctccccaaccagctcctaccaggatctctctgatttctacagagaggttgagccacagggctaccaggtgaagttcgtggatatcaacgccgactacatcaacgaacttgttgagcagggacagctctacctcttccagatctataacaaggacttcagccctaaggctcacggcaagccaaaccttcataccctctacttcaaggctctgttctccaaggacaacctcgcaaaccccatctacaagttgaacggcgaggctcagatcttctaccgcaaggcttctcttgacatgaacgagactaccatccacagagctggtgaggtgctcgaaaacaagaaccctgataaccccaagaaacgccagttcgtgtacgacatcatcaaggacaagaggtacacccaggataagttcatgctccacgtgccaatcaccatgaacttcggagttcagggcatgaccatcaaagagttcaacaagaaagtcaaccagagcatccagcagtacgacgaggttaacgtgatcggaattgatagaggtgagaggcaccttctctacctcaccgtgattaactccaagggcgagattctcgagcagcgctcccttaacgatattaccactgcttctgctaacggcacccagatgactactccataccacaagatcctcgacaagcgcgagattgagagactcaacgctagagttggatggggcgagatcgagactatcaaagagcttaagtccggctacctctctcacgttgtgcaccagatttcccagctcatgctcaagtacaacgctatcgtggtgcttgaggaccttaacttcggtttcaagcgcggaaggttcaaggtcgagaagcagatctaccaaaacttcgaaaacgccctcattaagaagctcaaccacctcgttctcaaggatgaggctgatgatgagatcggctcttacaagaacgctctccagctcactaacaactttaccgacctcaagtccatcggaaagcagaccggattcttgttctacgtgccagcttggaacacctccaagatcgatccagagactggattcgtggatctcctcaagccacgctacgagaacattgctcaatcccaggctttcttcggcaagttcgacaagatctgctacaacgctgacaaggactacttcgagttccacatcgactacgccaagttcaccgacaaggcaaagaactccaggcagatatggaagatctgcagtcacggcgacaagcgttacgtgtacgataagactgccaaccagaacaagggtgctaccaagggaatcaacgtgaacgacgagctgaagtcactcttcgctaggcatcacattaacgacaagcagcccaacctcgtgatggacatttgccagaacaacgacaaagaattccacaagtccctgatctacctcctcaagacccttcttgctctcaggtactccaacgcttcctccgatgaggatttcatcttgtccccagtggctaacgatgagggcatgttcttcaactccgctcttgctgatgatacccagccacaaaacgctgatgctaacggtgcttaccacattgctctcaaaggactttgggtcctcgagcagatcaagaactccgatgacctcaacaaggttaagctcgccattgacaaccagacctggttgaacttcgctcagaacaggtgacggaccgtgacgatcaaccataccagaggcgcgccatatgaagatgaagatgaaatatttggtgtgtcaaataaaaagcttgtgtgcttaagtttgtgtttttttcttggcttgttgtgttatgaatttgtggctttttctaatattaaatgaatgtaagatctcattataatgaataaacaaatgtttctataatccattgtgaatgttttgttggatctcttctgcagcatataactactgtatgtgctatggtatggactatggaatatgattaaagataaggcggccgcattaccctgttatccctaaagcttgaattcagtacattaaaaacgtccgcaatgtgttattaagttgtctaagcccgggctgggcctcatgggccttccgctcactgcccgctttccagtcgggaaacctgtcgtgccagctgcattaacatggtcatagctgtttccttgcgtattgggcgctctccgcttcctcgctcactgactcgctgcgctcggtcgttcgggtaaagcctggggtgcctaatgagcaaaaggccagcaaaaggccaggaaccgtaaaaaggccgcgttgctggcgtttttccataggctccgcccccctgacgagcatcacaaaaatcgacgctcaagtcagaggtggcgaaacccgacaggactataaagataccaggcgtttccccctggaagctccctcgtgcgctctcctgttccgaccctgccgcttaccggatacctgtccgcctttctcccttcgggaagcgtggcgctttctcatagctcacgctgtaggtatctcagttcggtgtaggtcgttcgctccaagctgggctgtgtgcacgaaccccccgttcagcccgaccgctgcgccttatccggtaactatcgtcttgagtccaacccggtaagacacgacttatcgccactggcagcagccactggtaacaggattagcagagcgaggtatgtaggcggtgctacagagttcttgaagtggtggcctaactacggctacactagaagaacagtatttggtatctgcgctctgctgaagccagttaccttcggaaaaagagttggtagctcttgatccggcaaacaaaccaccgctggtagcggtggtttttttgtttgcaagcagcagattacgcgcagaaaaaaaggatctcaagaagatcctttgatcttttctacggggtctgacgctcagtggaacgaaaactcacgttaagggattttggtcatgagattatcaaaaaggatcttcacctagatccttttaaattaaaaatgaagttttaaatcaatctaaagtatatatgagtaaacttggtctgacagttaccaatgcttaatcagtgaggcacctatctcagcgatctgtctatttcgttcatccatagttgcctgactccccgtcgtgtagataactacgatacgggagggcttaccatctggccccagtgctgcaatgataccgcgagaaccacgctcaccggctccagatttatcagcaataaaccagccagccggaagggccgagcgcagaagtggtcctgcaactttatccgcctccatccagtctattaattgttgccgggaagctagagtaagtagttcgccagttaatagtttgcgcaacgttgttgccattgctacaggcatcgtggtgtcacgctcgtcgtttggtatggcttcattcagctccggttcccaacgatcaaggcgagttacatgatcccccatgttgtgcaaaaaagcggttagctccttcggtcctccgatcgttgtcagaagtaagttggccgcagtgttatcactcatggttatggcagcactgcataattctcttactgtcatgccatccgtaagatgcttttctgtgactggtgagtactcaaccaagtcattctgagaatagtgtatgcggcgaccgagttgctcttgcccggcgtcaatacgggataataccgcgccacatagcagaactttaaaagtgctcatcattggaaaacgttcttcggggcgaaaactctcaaggatcttaccgctgttgagatccagttcgatgtaacccactcgtgcacccaactgatcttcagcatcttttactttcaccagcgtttctgggtgagcaaaaacaggaaggcaaaatgccgcaaaaaagggaataagggcgacacggaaatgttgaatactcatactcttcctttttcaatattattgaagcatttatcagggttattgtctcatgagcggatacatatttgaatgtatttagaaaaataaacaaataggggttccgcgcacatttccccgaaaagtgccac

SEQ ID NO: 23 - DNA, 7699 bp, Artificial Sequence
  plant transformation vector
  misc_feature (1)..(7699): plant transformation vector
  misc_feature (465)..(1525): AtUbi11 promoter
  misc_feature (1534)..(5355): McCpf1 D172R coding sequence
  misc_feature (5391)..(5640): HSP terminator
ctaaattgtaagcgttaatattttgttaaaattcgcgttaaatttttgttaaatcagctcattttttaaccaataggccgaaatcggcaaaatcccttataaatcaaaagaatagaccgagatagggttgagtggccgctacagggcgctcccattcgccattcaggctgcgcaactgttgggaagggcgtttcggtgcgggcctcttcgctattacgccagctggcgaaagggggatgtgctgcaaggcgattaagttgggtaacgccagggttttcccagtcacgacgttgtaaaacgacggccagtgagcgcgacgtaatacgactcactatagggcgaattggcggaaggccgtcaaggccgcatcccgggttgtagctccacgcgcttcggcaggggaagctctacttaatcggaagtccatatgtaactataacggtcctaaggtagcgagcgatcgcttgcaaacagaggagatatactaagcctttggaagagtgtatagatgagctagaactctacacacttggtcaatactagatttatctgcatcaaatgctttccaccagggtggattctctgggagaggtacttgaaacctacgtgcagcagcatacacgaccccacaagccagaacctcacttctgaaccttacacaaagggttgtacgcagactatcattagccaaattccaagcttcttgcctcaattccggaggtgtttctagtgttcaacatgacaaacaaaacccatctctttcagtatatgtctctcagttgtgcttaattcaaatttcaactcagagaacttcttggcatacttatccagattatctaatgatctcatctaatggtaattcaactttcagtataagtctcgcagcaaactatctttacatcaaatttttaacaactcaatgcacaaaatacttttcctcaacctaaaaataaggcaattagccaaaaacaactttgcgtgtgaacaacgcgtacacgtccctacacatacctgtcaatttataattggctattgcttccacgccttagctttctcgtgaccgaccgagtcgtcctcgtcttttttgcttctataaatcaaatacccaaagagctcttcttcttcacaattcagattccaattttctcaaactctaaaatcaatctctcaaatctctcaaccgtgatcaaggtagatttctgagttcttattgtatttcttcgatttgtttcgttcgatcgcaatttaggctctgttctttgattttgatctcgttaatctctgatcggaggcaaattacatagtttcatcgttagatctcttcttatttctcgattagggttcgtatttttcgcagatctgtttattttcttgttgtttccttgtatttgatccgatttgttgaaagaatttgtgtgttctcgattatttacgctttgatctgtgatttttatctagatttggtgttagtttcttgtttgtgcgatcgaatttgtcgattaatctcggtttatctgattaacaggtttaaacatggccccaaagaaaaagcgcaaggtgatgctgttccaggacttcacccatctctacccactctcaaagaccatgcgcttcgagcttaagccaatcggaaagacccttgagcacatccacgccaagaactttttgtcccaggatgagactatggccgacatgtaccagaaggtgaaggctatcctcgatgactaccacagggatttcattgccgacatgatgggcgaagtgaagcttaccaagctcgccgagttctacgatgtgtacctcaagttccgcaagaacccaaaggatgatggactccagaagcagctcaaggatcttcaggctgtgctgcgcaaagagatcgttaagcctattggaaacggcggcaagtacaaggctggatacgatagacttttcggcgccaagcttttcaaggacggaaaagagcttggcgacctcgctaagttcgtgattgctcaagaaggcgagtcctctccaaagcttgctcatttggctcacttcgagaagttctccacctacttcaccggcttccacagaaaccgtaagaacatgtactccgacgaggataagcacaccgctattacctacaggctcatccacgagaacctgccacgcttcattgataacctccagatcctcgctaccatcaagcaaaagcactctgccctctacgaccagatcatcaacgagcttactgcctccggacttgatgtgtctcttgcttctcacctcgacggctaccataagcttttgacccaagagggcattaccgcctacaacactcttctcggaggaatttctggtgaggctggctctaggaagatccagggtattaacgaactcatcaactcccaccacaaccagcactgccataagtctgagaggattgctaagctcaggccactccacaagcagatcctttctgatggaatgggcgtgtccttcctgccatcaaagttcgctgatgactctgagatgtgccaggctgtgaacgagttctataggcactacgctgatgtgttcgccaaggtgcagtctctcttcgatggattcgatgaccaccaaaaggacggcatctacgtcgagcacaagaacctcaacgagttgtccaagcaggctttcggagatttcgctctccttggaagagtgctggatggctactatgtggatgttgtgaaccccgagttcaacgagagattcgctaaggctaagaccgataacgctaaggccaagctcaccaaagagaaggacaagttcatcaagggcgtgcactcactcgcttctctcgaacaagctattgagcactacaccgctaggcacgatgatgagtctgttcaggctggaaagctcggccaatatttcaagcacggacttgctggtgtggacaacccaattcagaagatccacaacaaccactccaccatcaagggattccttgagagagaaagaccagctggcgaaagggctctcccaaagattaagtctggaaagaacccagagatgacccagctcaggcagcttaaagagcttcttgacaacgctcttaacgtggcccacttcgctaagcttctcactaccaagaccactctcgataaccaggacggtaacttctacggtgagttcggtgctctctacgatgagcttgctaagatccccaccttgtacaacaaggtgagggactaccttagccagaagccattctctaccgagaagtacaagctcaacttcggcaacccaaccttgctcaacggatgggatctcaacaaagaaaaggataacttcgggatcatcctccagaaggacggttgctactaccttgctttgctcgataaggcccacaagaaggtgttcgataacgcaccaaacaccggcaagaacgtctaccagaagatgatctacaagctgctccccggaccaaacaagatgcttccaaaggtgttcttcgccaagtccaacctcgactactacaacccttctgctgagctgttggataagtacgctcagggcactcataagaagggcaacaacttcaacctcaaggactgccacgcactcatcgatttcttcaaggccggaatcaacaagcacccagagtggcaacatttcggcttcaagttctccccaaccagctcctaccaggatctctctgatttctacagagaggttgagccacagggctaccaggtgaagttcgtggatatcaacgccgactacatcaacgaacttgttgagcagggacagctctacctcttccagatctataacaaggacttcagccctaaggctcacggcaagccaaaccttcataccctctacttcaaggctctgttctccaaggacaacctcgcaaaccccatctacaagttgaacggcgaggctcagatcttctaccgcaaggcttctcttgacatgaacgagactaccatccacagagctggtgaggtgctcgaaaacaagaaccctgataaccccaagaaacgccagttcgtgtacgacatcatcaaggacaagaggtacacccaggataagttcatgctccacgtgccaatcaccatgaacttcggagttcagggcatgaccatcaaagagttcaacaagaaagtcaaccagagcatccagcagtacgacgaggttaacgtgatcggaattgatagaggtgagaggcaccttctctacctcaccgtgattaactccaagggcgagattctcgagcagcgctcccttaacgatattaccactgcttctgctaacggcacccagatgactactccataccacaagatcctcgacaagcgcgagattgagagactcaacgctagagttggatggggcgagatcgagactatcaaagagcttaagtccggctacctctctcacgttgtgcaccagatttcccagctcatgctcaagtacaacgctatcgtggtgcttgaggaccttaacttcggtttcaagcgcggaaggttcaaggtcgagaagcagatctaccaaaacttcgaaaacgccctcattaagaagctcaaccacctcgttctcaaggatgaggctgatgatgagatcggctcttacaagaacgctctccagctcactaacaactttaccgacctcaagtccatcggaaagcagaccggattcttgttctacgtgccagcttggaacacctccaagatcgatccagagactggattcgtggatctcctcaagccacgctacgagaacattgctcaatcccaggctttcttcggcaagttcgacaagatctgctacaacgctgacaaggactacttcgagttccacatcgactacgccaagttcaccgacaaggcaaagaactccaggcagatatggaagatctgcagtcacggcgacaagcgttacgtgtacgataagactgccaaccagaacaagggtgctaccaagggaatcaacgtgaacgacgagctgaagtcactcttcgctaggcatcacattaacgacaagcagcccaacctcgtgatggacatttgccagaacaacgacaaagaattccacaagtccctgatctacctcctcaagacccttcttgctctcaggtactccaacgcttcctccgatgaggatttcatcttgtccccagtggctaacgatgagggcatgttcttcaactccgctcttgctgatgatacccagccacaaaacgctgatgctaacggtgcttaccacattgctctcaaaggactttgggtcctcgagcagatcaagaactccgatgacctcaacaaggttaagctcgccattgacaaccagacctggttgaacttcgctcagaacaggtgacggaccgtgacgatcaaccataccagaggcgcgccatatgaagatgaagatgaaatatttggtgtgtcaaataaaaagcttgtgtgcttaagtttgtgtttttttcttggcttgttgtgttatgaatttgtggctttttctaatattaaatgaatgtaagatctcattataatgaataaacaaatgtttctataatccattgtgaatgttttgttggatctcttctgcagcatataactactgtatgtgctatggtatggactatggaatatgattaaagataaggcggccgcattaccctgttatccctaaagcttgaattcagtacattaaaaacgtccgcaatgtgttattaagttgtctaagcccgggctgggcctcatgggccttccgctcactgcccgctttccagtcgggaaacctgtcgtgccagctgcattaacatggtcatagctgtttccttgcgtattgggcgctctccgcttcctcgctcactgactcgctgcgctcggtcgttcgggtaaagcctggggtgcctaatgagcaaaaggccagcaaaaggccaggaaccgtaaaaaggccgcgttgctggcgtttttccataggctccgcccccctgacgagcatcacaaaaatcgacgctcaagtcagaggtggcgaaacccgacaggactataaagataccaggcgtttccccctggaagctccctcgtgcgctctcctgttccgaccctgccgcttaccggatacctgtccgcctttctcccttcgggaagcgtggcgctttctcatagctcacgctgtaggtatctcagttcggtgtaggtcgttcgctccaagctgggctgtgtgcacgaaccccccgttcagcccgaccgctgcgccttatccggtaactatcgtcttgagtccaacccggtaagacacgacttatcgccactggcagcagccactggtaacaggattagcagagcgaggtatgtaggcggtgctacagagttcttgaagtggtggcctaactacggctacactagaagaacagtatttggtatctgcgctctgctgaagccagttaccttcggaaaaagagttggtagctcttgatccggcaaacaaaccaccgctggtagcggtggtttttttgtttgcaagcagcagattacgcgcagaaaaaaaggatctcaagaagatcctttgatcttttctacggggtctgacgctcagtggaacgaaaactcacgttaagggattttggtcatgagattatcaaaaaggatcttcacctagatccttttaaattaaaaatgaagttttaaatcaatctaaagtatatatgagtaaacttggtctgacagttaccaatgcttaatcagtgaggcacctatctcagcgatctgtctatttcgttcatccatagttgcctgactccccgtcgtgtagataactacgatacgggagggcttaccatctggccccagtgctgcaatgataccgcgagaaccacgctcaccggctccagatttatcagcaataaaccagccagccggaagggccgagcgcagaagtggtcctgcaactttatccgcctccatccagtctattaattgttgccgggaagctagagtaagtagttcgccagttaatagtttgcgcaacgttgttgccattgctacaggcatcgtggtgtcacgctcgtcgtttggtatggcttcattcagctccggttcccaacgatcaaggcgagttacatgatcccccatgttgtgcaaaaaagcggttagctccttcggtcctccgatcgttgtcagaagtaagttggccgcagtgttatcactcatggttatggcagcactgcataattctcttactgtcatgccatccgtaagatgcttttctgtgactggtgagtactcaaccaagtcattctgagaatagtgtatgcggcgaccgagttgctcttgcccggcgtcaatacgggataataccgcgccacatagcagaactttaaaagtgctcatcattggaaaacgttcttcggggcgaaaactctcaaggatcttaccgctgttgagatccagttcgatgtaacccactcgtgcacccaactgatcttcagcatcttttactttcaccagcgtttctgggtgagcaaaaacaggaaggcaaaatgccgcaaaaaagggaataagggcgacacggaaatgttgaatactcatactcttcctttttcaatattattgaagcatttatcagggttattgtctcatgagcggatacatatttgaatgtatttagaaaaataaacaaataggggttccgcgcacatttccccgaaaagtgccac

SEQ ID NO: 24 - DNA, 3801 bp, Prevotella bryantii B14
  misc_feature (1)..(3801): Pb2Cpf1 plant codon-optimized sequence
atggccccaaagaaaaagcgcaaggtgatgcagatcaacaacctcaagatcatctacatgaagttcaccgactttaccggcctctacagcctttctaagaccctcagattcgagcttaagcccatcggaaagaccctcgagaatatcaagaaggctggactccttgagcaggatcagcatagggctgactcttacaagaaggtgaagaagatcatcgacgagtaccacaaggccttcatcgagaagtccctcagcaacttcgagctgaagtaccagtccgaggataagctcgattccctcgaagagtacctcatgtactactccatgaagcgcatcgagaaaaccgagaaggacaagttcgctaagatccaggacaacctgaggaagcagattgctgatcacctcaagggtgacgagtcctacaagaccatcttctccaaggacctcatccgcaagaaccttccagacttcgtgaagtccgatgaagagaggaccctcatcaaagagttcaaggacttcaccacctacttcaagggcttctacgagaaccgcgagaacatgtactctgccgaggacaagtctaccgctatctcccacaggattatccacgagaacctgccaaagttcgtggacaacatcaacgccttctctaagatcattctcatccccgagcttcgcgagaagctgaaccagatctatcaggacttcgaggaatacctcaacgtcgagtccatcgatgagatcttccacctcgactacttctccatggtgatgacccagaagcagatcgaggtttacaacgctatcatcggcgggaagtccaccaacgataagaagattcagggcctcaacgagtacatcaacctctacaaccagaagcacaaggactgcaagctccccaagctcaagcttctgttcaagcagatcctctccgataggatcgctatctcttggctcccagacaacttcaaggatgatcaagaggccctcgacagcatcgatacctgctacaagaacctcctcaacgatggaaacgttctcggagagggaaaccttaagctcctgctcgagaacatcgacacctacaaccttaagggcatcttcatccgtaacgacctccagctcaccgacatctctcaaaagatgtacgcctcctggaacgtgatccaggatgctgtgattctcgacctcaagaagcaagtctcccgcaagaagaaagagtccgctgaggattacaacgaccgcctgaagaagctctacaccagccaagagtccttcagcatccagtaccttaacgattgcctccgcgcttacggaaagactgagaacatccaggattacttcgctaagctcggcgctgttaacaacgagcatgagcagaccattaacctcttcgctcaggtgaggaacgcttacacttctgtgcaggctattctcactaccccatatccagagaacgctaacctcgctcaggacaaagagactgtcgccctgattaagaacctgctcgactcccttaagaggctccagcgctttattaagccactcctcggaaagggtgatgagagcgataaggatgagaggttctacggcgatttcaccccactttgggagactctcaaccagattaccccactctacaacatggtccgcaactacatgactcgcaagccctactctcaagagaagattaagctgaacttcgagaacagcaccctcctcggaggatgggatttgaacaaagagcacgataacaccgccatcatcctcagaaagaacgggctttactacctcgccatcatgaagaagtccgccaacaagatcttcgacaaggacaagctcgacaactccggtgattgctacgaaaagatggtgtacaagcttctcccaggcgctaacaagatgctcccaaaggtgttcttcagcaagtcccgcattgacgagttcaagccctcagagaacattatcgaaaactataagaagggcacccacaagaagggcgccaacttcaaccttgctgattgccacaacctcatcgatttcttcaagtcctccatctccaagcacgaggattggtccaagttcaacttccacttctccgacaccagctcctacgaggatctctctgatttctaccgcgaggttgagcagcagggctactccatttctttctgtgatgtgtccgtcgagtatatcaacaagatggtcgagaagggcgacctctacctcttccagatctacaacaaggatttctccgagttcagcaagggcactccaaacatgcataccctctactggaacagcctgttctccaaagagaacctcaacaacattatctacaagctcaacggccaggccgagatcttctttaggaagaagtctctcaactacaagcgcccaactcacccagctcatcaggctatcaagaacaagaacaaatgcaacgaaaagaaagaatccatcttcgactacgacctcgtgaaggataagaggtacaccgtcgacaagttccagttccacgtgccaatcaccatgaacttcaagagcaccggcaacaccaacattaaccagcaggttatcgactacctcaggaccgaggatgatacccacatcatcggaattgatagaggcgagaggcaccttctttacctcgtggtgattgattcccacggcaagatcgttgagcagttcacccttaacgagatcgtgaacgagtacggcggaaacatctacaggaccaactaccacgatctcctcgataccagagagcagaacagagagaaggctagagagtcttggcagaccatcgaaaacatcaaagaactcaaagagggctacatctcccaggtgatccacaagattaccgacctcatgcagaagtaccacgccgttgttgtgcttgaggatctcaacatgggattcatgagaggcaggcagaaggtggaaaagcaggtctaccaaaagttcgaagagatgctcatcaacaagctaaactacctggtgaacaagaaggccgaccagaactctgctggtggattgcttcatgcttaccagctgacctccaagttcgagtccttccagaagttgggtaagcagtccggcttcctcttctacattcctgcttggaacaccagcaagatcgatccagttaccggattcgtgaacctgttcgacactcgctacgagtccattgataaggctaaggccttcttcggcaagttcgactccattaggtacaacgccgataaggactggttcgagttcgctttcgactacaacaacttcactaccaaggctgaaggcaccaggactaactggactatctgcacttacggctctcgcatcaggaccttcagaaaccaggctaagaactcccagtgggacaacgaggaaatcgatctcaccaaggcctacaaggctttcttcgcaaagcacggcatcaacatctacgacaatatcaaagaggctatcgccatggaaactgagaagagtttcttcgaggacctcctccacctccttaagcttactcttcagatgcgcaactccatcactggaaccaccaccgattacctcatttccccagtgcacgattccaagggcaacttctacgattccaggatctgcgacaactctctcccagctaacgctgatgctaacggcgcttacaacattgctagaaagggcctcatgctcattcagcagatcaaggacagcaccagcagcaaccgtttcaagttctccccaattaccaacaaagactggctcatcttcgcccaagagaagccatacttgaacgactga

SEQ ID NO: 25 - DNA, 3801 bp, Prevotella bryantii B14
  misc_feature (1)..(3801): Pb2 E173R Cpf1 plant codon-optimized sequence
atggccccaaagaaaaagcgcaaggtgatgcagatcaacaacctcaagatcatctacatgaagttcaccgactttaccggcctctacagcctttctaagaccctcagattcgagcttaagcccatcggaaagaccctcgagaatatcaagaaggctggactccttgagcaggatcagcatagggctgactcttacaagaaggtgaagaagatcatcgacgagtaccacaaggccttcatcgagaagtccctcagcaacttcgagctgaagtaccagtccgaggataagctcgattccctcgaagagtacctcatgtactactccatgaagcgcatcgagaaaaccgagaaggacaagttcgctaagatccaggacaacctgaggaagcagattgctgatcacctcaagggtgacgagtcctacaagaccatcttctccaaggacctcatccgcaagaaccttccagacttcgtgaagtccgatgaagagaggaccctcatcaaagagttcaaggacttcaccacctacttcaagggcttctacagaaaccgcgagaacatgtactctgccgaggacaagtctaccgctatctcccacaggattatccacgagaacctgccaaagttcgtggacaacatcaacgccttctctaagatcattctcatccccgagcttcgcgagaagctgaaccagatctatcaggacttcgaggaatacctcaacgtcgagtccatcgatgagatcttccacctcgactacttctccatggtgatgacccagaagcagatcgaggtttacaacgctatcatcggcgggaagtccaccaacgataagaagattcagggcctcaacgagtacatcaacctctacaaccagaagcacaaggactgcaagctccccaagctcaagcttctgttcaagcagatcctctccgataggatcgctatctcttggctcccagacaacttcaaggatgatcaagaggccctcgacagcatcgatacctgctacaagaacctcctcaacgatggaaacgttctcggagagggaaaccttaagctcctgctcgagaacatcgacacctacaaccttaagggcatcttcatccgtaacgacctccagctcaccgacatctctcaaaagatgtacgcctcctggaacgtgatccaggatgctgtgattctcgacctcaagaagcaagtctcccgcaagaagaaagagtccgctgaggattacaacgaccgcctgaagaagctctacaccagccaagagtccttcagcatccagtaccttaacgattgcctccgcgcttacggaaagactgagaacatccaggattacttcgctaagctcggcgctgttaacaacgagcatgagcagaccattaacctcttcgctcaggtgaggaacgcttacacttctgtgcaggctattctcactaccccatatccagagaacgctaacctcgctcaggacaaagagactgtcgccctgattaagaacctgctcgactcccttaagaggctccagcgctttattaagccactcctcggaaagggtgatgagagcgataaggatgagaggttctacggcgatttcaccccactttgggagactctcaaccagattaccccactctacaacatggtccgcaactacatgactcgcaagccctactctcaagagaagattaagctgaacttcgagaacagcaccctcctcggaggatgggatttgaacaaagagcacgataacaccgccatcatcctcagaaagaacgggctttactacctcgccatcatgaagaagtccgccaacaagatcttcgacaaggacaagctcgacaactccggtgattgctacgaaaagatggtgtacaagcttctcccaggcgctaacaagatgctcccaaaggtgttcttcagcaagtcccgcattgacgagttcaagccctcagagaacattatcgaaaactataagaagggcacccacaagaagggcgccaacttcaaccttgctgattgccacaacctcatcgatttcttcaagtcctccatctccaagcacgaggattggtccaagttcaacttccacttctccgacaccagctcctacgaggatctctctgatttctaccgcgaggttgagcagcagggctactccatttctttctgtgatgtgtccgtcgagtatatcaacaagatggtcgagaagggcgacctctacctcttccagatctacaacaaggatttctccgagttcagcaagggcactccaaacatgcataccctctactggaacagcctgttctccaaagagaacctcaacaacattatctacaagctcaacggccaggccgagatcttctttaggaagaagtctctcaactacaagcgcccaactcacccagctcatcaggctatcaagaacaagaacaaatgcaacgaaaagaaagaatccatcttcgactacgacctcgtgaaggataagaggtacaccgtcgacaagttccagttccacgtgccaatcaccatgaacttcaagagcaccggcaacaccaacattaaccagcaggttatcgactacctcaggaccgaggatgatacccacatcatcggaattgatagaggcgagaggcaccttctttacctcgtggtgattgattcccacggcaagatcgttgagcagttcacccttaacgagatcgtgaacgagtacggcggaaacatctacaggaccaactaccacgatctcctcgataccagagagcagaacagagagaaggctagagagtcttggcagaccatcgaaaacatcaaagaactcaaagagggctacatctcccaggtgatccacaagattaccgacctcatgcagaagtaccacgccgttgttgtgcttgaggatctcaacatgggattcatgagaggcaggcagaaggtggaaaagcaggtctaccaaaagttcgaagagatgctcatcaacaagctaaactacctggtgaacaagaaggccgaccagaactctgctggtggattgcttcatgcttaccagctgacctccaagttcgagtccttccagaagttgggtaagcagtccggcttcctcttctacattcctgcttggaacaccagcaagatcgatccagttaccggattcgtgaacctgttcgacactcgctacgagtccattgataaggctaaggccttcttcggcaagttcgactccattaggtacaacgccgataaggactggttcgagttcgctttcgactacaacaacttcactaccaaggctgaaggcaccaggactaactggactatctgcacttacggctctcgcatcaggaccttcagaaaccaggctaagaactcccagtgggacaacgaggaaatcgatctcaccaaggcctacaaggctttcttcgcaaagcacggcatcaacatctacgacaatatcaaagaggctatcgccatggaaactgagaagagtttcttcgaggacctcctccacctccttaagcttactcttcagatgcgcaactccatcactggaaccaccaccgattacctcatttccccagtgcacgattccaagggcaacttctacgattccaggatctgcgacaactctctcccagctaacgctgatgctaacggcgcttacaacattgctagaaagggcctcatgctcattcagcagatcaaggacagcaccagcagcaaccgtttcaagttctccccaattaccaacaaagactggctcatcttcgcccaagagaagccatacttgaacgactga

SEQ ID NO: 26 - DNA, 3822 bp, Moraxella caprae
  misc_feature (1)..(3822): McCpf1 plant codon optimized sequence
atggccccaaagaaaaagcgcaaggtgatgctgttccaggacttcacccatctctacccactctcaaagaccatgcgcttcgagcttaagccaatcggaaagacccttgagcacatccacgccaagaactttttgtcccaggatgagactatggccgacatgtaccagaaggtgaaggctatcctcgatgactaccacagggatttcattgccgacatgatgggcgaagtgaagcttaccaagctcgccgagttctacgatgtgtacctcaagttccgcaagaacccaaaggatgatggactccagaagcagctcaaggatcttcaggctgtgctgcgcaaagagatcgttaagcctattggaaacggcggcaagtacaaggctggatacgatagacttttcggcgccaagcttttcaaggacggaaaagagcttggcgacctcgctaagttcgtgattgctcaagaaggcgagtcctctccaaagcttgctcatttggctcacttcgagaagttctccacctacttcaccggcttccacgacaaccgtaagaacatgtactccgacgaggataagcacaccgctattacctacaggctcatccacgagaacctgccacgcttcattgataacctccagatcctcgctaccatcaagcaaaagcactctgccctctacgaccagatcatcaacgagcttactgcctccggacttgatgtgtctcttgcttctcacctcgacggctaccataagcttttgacccaagagggcattaccgcctacaacactcttctcggaggaatttctggtgaggctggctctaggaagatccagggtattaacgaactcatcaactcccaccacaaccagcactgccataagtctgagaggattgctaagctcaggccactccacaagcagatcctttctgatggaatgggcgtgtccttcctgccatcaaagttcgctgatgactctgagatgtgccaggctgtgaacgagttctataggcactacgctgatgtgttcgccaaggtgcagtctctcttcgatggattcgatgaccaccaaaaggacggcatctacgtcgagcacaagaacctcaacgagttgtccaagcaggctttcggagatttcgctctccttggaagagtgctggatggctactatgtggatgttgtgaaccccgagttcaacgagagattcgctaaggctaagaccgataacgctaaggccaagctcaccaaagagaaggacaagttcatcaagggcgtgcactcactcgcttctctcgaacaagctattgagcactacaccgctaggcacgatgatgagtctgttcaggctggaaagctcggccaatatttcaagcacggacttgctggtgtggacaacccaattcagaagatccacaacaaccactccaccatcaagggattccttgagagagaaagaccagctggcgaaagggctctcccaaagattaagtctggaaagaacccagagatgacccagctcaggcagcttaaagagcttcttgacaacgctcttaacgtggcccacttcgctaagcttctcactaccaagaccactctcgataaccaggacggtaacttctacggtgagttcggtgctctctacgatgagcttgctaagatccccaccttgtacaacaaggtgagggactaccttagccagaagccattctctaccgagaagtacaagctcaacttcggcaacccaaccttgctcaacggatgggatctcaacaaagaaaaggataacttcgggatcatcctccagaaggacggttgctactaccttgctttgctcgataaggcccacaagaaggtgttcgataacgcaccaaacaccggcaagaacgtctaccagaagatgatctacaagctgctccccggaccaaacaagatgcttccaaaggtgttcttcgccaagtccaacctcgactactacaacccttctgctgagctgttggataagtacgctcagggcactcataagaagggcaacaacttcaacctcaaggactgccacgcactcatcgatttcttcaaggccggaatcaacaagcacccagagtggcaacatttcggcttcaagttctccccaaccagctcctaccaggatctctctgatttctacagagaggttgagccacagggctaccaggtgaagttcgtggatatcaacgccgactacatcaacgaacttgttgagcagggacagctctacctcttccagatctataacaaggacttcagccctaaggctcacggcaagccaaaccttcataccctctacttcaaggctctgttctccaaggacaacctcgcaaaccccatctacaagttgaacggcgaggctcagatcttctaccgcaaggcttctcttgacatgaacgagactaccatccacagagctggtgaggtgctcgaaaacaagaaccctgataaccccaagaaacgccagttcgtgtacgacatcatcaaggacaagaggtacacccaggataagttcatgctccacgtgccaatcaccatgaacttcggagttcagggcatgaccatcaaagagttcaacaagaaagtcaaccagagcatccagcagtacgacgaggttaacgtgatcggaattgatagaggtgagaggcaccttctctacctcaccgtgattaactccaagggcgagattctcgagcagcgctcccttaacgatattaccactgcttctgctaacggcacccagatgactactccataccacaagatcctcgacaagcgcgagattgagagactcaacgctagagttggatggggcgagatcgagactatcaaagagcttaagtccggctacctctctcacgttgtgcaccagatttcccagctcatgctcaagtacaacgctatcgtggtgcttgaggaccttaacttcggtttcaagcgcggaaggttcaaggtcgagaagcagatctaccaaaacttcgaaaacgccctcattaagaagctcaaccacctcgttctcaaggatgaggctgatgatgagatcggctcttacaagaacgctctccagctcactaacaactttaccgacctcaagtccatcggaaagcagaccggattcttgttctacgtgccagcttggaacacctccaagatcgatccagagactggattcgtggatctcctcaagccacgctacgagaacattgctcaatcccaggctttcttcggcaagttcgacaagatctgctacaacgctgacaaggactacttcgagttccacatcgactacgccaagttcaccgacaaggcaaagaactccaggcagatatggaagatctgcagtcacggcgacaagcgttacgtgtacgataagactgccaaccagaacaagggtgctaccaagggaatcaacgtgaacgacgagctgaagtcactcttcgctaggcatcacattaacgacaagcagcccaacctcgtgatggacatttgccagaacaacgacaaagaattccacaagtccctgatctacctcctcaagacccttcttgctctcaggtactccaacgcttcctccgatgaggatttcatcttgtccccagtggctaacgatgagggcatgttcttcaactccgctcttgctgatgatacccagccacaaaacgctgatgctaacggtgcttaccacattgctctcaaaggactttgggtcctcgagcagatcaagaactccgatgacctcaacaaggttaagctcgccattgacaaccagacctggttgaacttcgctcagaacaggtga

SEQ ID NO: 27 - DNA, 3822 bp, Moraxella caprae
  misc_feature (1)..(3822): McCpf1 D172R plant codon optimized sequence
atggccccaaagaaaaagcgcaaggtgatgctgttccaggacttcacccatctctacccactctcaaagaccatgcgcttcgagcttaagccaatcggaaagacccttgagcacatccacgccaagaactttttgtcccaggatgagactatggccgacatgtaccagaaggtgaaggctatcctcgatgactaccacagggatttcattgccgacatgatgggcgaagtgaagcttaccaagctcgccgagttctacgatgtgtacctcaagttccgcaagaacccaaaggatgatggactccagaagcagctcaaggatcttcaggctgtgctgcgcaaagagatcgttaagcctattggaaacggcggcaagtacaaggctggatacgatagacttttcggcgccaagcttttcaaggacggaaaagagcttggcgacctcgctaagttcgtgattgctcaagaaggcgagtcctctccaaagcttgctcatttggctcacttcgagaagttctccacctacttcaccggcttccacagaaaccgtaagaacatgtactccgacgaggataagcacaccgctattacctacaggctcatccacgagaacctgccacgcttcattgataacctccagatcctcgctaccatcaagcaaaagcactctgccctctacgaccagatcatcaacgagcttactgcctccggacttgatgtgtctcttgcttctcacctcgacggctaccataagcttttgacccaagagggcattaccgcctacaacactcttctcggaggaatttctggtgaggctggctctaggaagatccagggtattaacgaactcatcaactcccaccacaaccagcactgccataagtctgagaggattgctaagctcaggccactccacaagcagatcctttctgatggaatgggcgtgtccttcctgccatcaaagttcgctgatgactctgagatgtgccaggctgtgaacgagttctataggcactacgctgatgtgttcgccaaggtgcagtctctcttcgatggattcgatgaccaccaaaaggacggcatctacgtcgagcacaagaacctcaacgagttgtccaagcaggctttcggagatttcgctctccttggaagagtgctggatggctactatgtggatgttgtgaaccccgagttcaacgagagattcgctaaggctaagaccgataacgctaaggccaagctcaccaaagagaaggacaagttcatcaagggcgtgcactcactcgcttctctcgaacaagctattgagcactacaccgctaggcacgatgatgagtctgttcaggctggaaagctcggccaatatttcaagcacggacttgctggtgtggacaacccaattcagaagatccacaacaaccactccaccatcaagggattccttgagagagaaagaccagctggcgaaagggctctcccaaagattaagtctggaaagaacccagagatgacccagctcaggcagcttaaagagcttcttgacaacgctcttaacgtggcccacttcgctaagcttctcactaccaagaccactctcgataaccaggacggtaacttctacggtgagttcggtgctctctacgatgagcttgctaagatccccaccttgtacaacaaggtgagggactaccttagccagaagccattctctaccgagaagtacaagctcaacttcggcaacccaaccttgctcaacggatgggatctcaacaaagaaaaggataacttcgggatcatcctccagaaggacggttgctactaccttgctttgctcgataaggcccacaagaaggtgttcgataacgcaccaaacaccggcaagaacgtctaccagaagatgatctacaagctgctccccggaccaaacaagatgcttccaaaggtgttcttcgccaagtccaacctcgactactacaacccttctgctgagctgttggataagtacgctcagggcactcataagaagggcaacaacttcaacctcaaggactgccacgcactcatcgatttcttcaaggccggaatcaacaagcacccagagtggcaacatttcggcttcaagttctccccaaccagctcctaccaggatctctctgatttctacagagaggttgagccacagggctaccaggtgaagttcgtggatatcaacgccgactacatcaacgaacttgttgagcagggacagctctacctcttccagatctataacaaggacttcagccctaaggctcacggcaagccaaaccttcataccctctacttcaaggctctgttctccaaggacaacctcgcaaaccccatctacaagttgaacggcgaggctcagatcttctaccgcaaggcttctcttgacatgaacgagactaccatccacagagctggtgaggtgctcgaaaacaagaaccctgataaccccaagaaacgccagttcgtgtacgacatcatcaaggacaagaggtacacccaggataagttcatgctccacgtgccaatcaccatgaacttcggagttcagggcatgaccatcaaagagttcaacaagaaagtcaaccagagcatccagcagtacgacgaggttaacgtgatcggaattgatagaggtgagaggcaccttctctacctcaccgtgattaactccaagggcgagattctcgagcagcgctcccttaacgatattaccactgcttctgctaacggcacccagatgactactccataccacaagatcctcgacaagcgcgagattgagagactcaacgctagagttggatggggcgagatcgagactatcaaagagcttaagtccggctacctctctcacgttgtgcaccagatttcccagctcatgctcaagtacaacgctatcgtggtgcttgaggaccttaacttcggtttcaagcgcggaaggttcaaggtcgagaagcagatctaccaaaacttcgaaaacgccctcattaagaagctcaaccacctcgttctcaaggatgaggctgatgatgagatcggctcttacaagaacgctctccagctcactaacaactttaccgacctcaagtccatcggaaagcagaccggattcttgttctacgtgccagcttggaacacctccaagatcgatccagagactggattcgtggatctcctcaagccacgctacgagaacattgctcaatcccaggctttcttcggcaagttcgacaagatctgctacaacgctgacaaggactacttcgagttccacatcgactacgccaagttcaccgacaaggcaaagaactccaggcagatatggaagatctgcagtcacggcgacaagcgttacgtgtacgataagactgccaaccagaacaagggtgctaccaagggaatcaacgtgaacgacgagctgaagtcactcttcgctaggcatcacattaacgacaagcagcccaacctcgtgatggacatttgccagaacaacgacaaagaattccacaagtccctgatctacctcctcaagacccttcttgctctcaggtactccaacgcttcctccgatgaggatttcatcttgtccccagtggctaacgatgagggcatgttcttcaactccgctcttgctgatgatacccagccacaaaacgctgatgctaacggtgcttaccacattgctctcaaaggactttgggtcctcgagcagatcaagaactccgatgacctcaacaaggttaagctcgccattgacaaccagacctggttgaacttcgctcagaacaggtga

SEQ ID NO: 28 - protein, 1307 aa, Acidaminococcus sp. BV3L6
  MISC_FEATURE (1)..(1307): AsCpf1
MTQFEGFTNLYQVSKTLRFELIPQGKTLKHIQEQGFIEEDKARNDHYKELKPIIDRIYKTYADQCLQLVQLDWENLSAAIDSYRKEKTEETRNALIEEQATYRNAIHDYFIGRTDNLTDAINKRHAEIYKGLFKAELFNGKVLKQLGTVTTTEHENALLRSFDKFTTYFSGFYENRKNVFSAEDISTAIPHRIVQDNFPKFKENCHIFTRLITAVPSLREHFENVKKAIGIFVSTSIEEVFSFPFYNQLLTQTQIDLYNQLLGGISREAGTEKIKGLNEVLNLAIQKNDETAHIIASLPHRFIPLFKQILSDRNTLSFILEEFKSDEEVIQSFCKYKTLLRNENVLETAEALFNELNSIDLTHIFISHKKLETISSALCDHWDTLRNALYERRISELTGKITKSAKEKVQRSLKHEDINLQEIISAAGKELSEAFKQKTSEILSHAHAALDQPLPTTLKKQEEKEILKSQLDSLLGLYHLLDWFAVDESNEVDPEFSARLTGIKLEMEPSLSFYNKARNYATKKPYSVEKFKLNFQMPTLASGWDVNKEKNNGAILFVKNGLYYLGIMPKQKGRYKALSFEPTEKTSEGFDKMYYDYFPDAAKMIPKCSTQLKAVTAHFQTHTTPILLSNNFIEPLEITKEIYDLNNPEKEPKKFQTAYAKKTGDQKGYREALCKWIDFTRDFLSKYTKTTSIDLSSLRPSSQYKDLGEYYAELNPLLYHISFQRIAEKEIMDAVETGKLYLFQIYNKDFAKGHHGKPNLHTLYWTGLFSPENLAKTSIKLNGQAELFYRPKSRMKRMAHRLGEKMLNKKLKDQKTPIPDTLYQELYDYVNHRLSHDLSDEARALLPNVITKEVSHEIIKDRRFTSDKFFFHVPITLNYQAANSPSKFNQRVNAYLKEHPETPIIGIDRGERNLIYITVIDSTGKILEQRSLNTIQQFDYQKKLDNREKERVAARQAWSVVGTIKDLKQGYLSQVIHEIVDLMIHYQAVVVLENLNFGFKSKRTGIAEKAVYQQFEKMLIDKLNCLVLKDYPAEKVGGVLNPYQLTDQFTSFAKMGTQSGFLFYVPAPYTSKIDPLTGFVDPFVWKTIKNHESRKHFLEGFDFLHYDVKTGDFILHFKMNRNLSFQRGLPGFMPAWDIVFEKNETQFDAKGTPFIAGKRIVPVIENHRFTGRYRDLYPANELIALLEEKGIVFRDGSNILPKLLENDDSHAIDTMVALIRSVLQMRNSNAATGEDYINSPVRDLNGVCFDSRFQNPEWPMDADANGAYHIALKGQLLLNHLKESKDLKLQNGISNQDWLAYIQELRN

SEQ ID NO: 29 - protein, 1300 aa, Francisella tularensis subsp. novicida U112
  MISC_FEATURE (1)..(1300): FnCpf1
MSIYQEFVNKYSLSKTLRFELIPQGKTLENIKARGLILDDEKRAKDYKKAKQIIDKYHQFFIEEILSSVCISEDLLQNYSDVYFKLKKSDDDNLQKDFKSAKDTIKKQISEYIKDSEKFKNLFNQNLIDAKKGQESDLILWLKQSKDNGIELFKANSDITDIDEALEIIKSFKGWTTYFKGFHENRKNVYSSNDIPTSIIYRIVDDNLPKFLENKAKYESLKDKAPEAINYEQIKKDLAEELTFDIDYKTSEVNQRVFSLDEVFEIANFNNYLNQSGITKFNTIIGGKFVNGENTKRKGINEYINLYSQQINDKTLKKYKMSVLFKQILSDTESKSFVIDKLEDDSDVVTTMQSFYEQIAAFKTVEEKSIKETLSLLFDDLKAQKLDLSKIYFKNDKSLTDLSQQVFDDYSVIGTAVLEYITQQIAPKNLDNPSKKEQELIAKKTEKAKYLSLETIKLALEEFNKHRDIDKQCRFEEILANFAAIPMIFDEIAQNKDNLAQISIKYQNQGKKDLLQASAEDDVKAIKDLLDQTNNLLHKLKIFHISQSEDKANILDKDEHFYLVFEECYFELANIVPLYNKIRNYITQKPYSDEKFKLNFENSTLANGWDKNKEPDNTAILFIKDDKYYLGVMNKKNNKIFDDKAIKENKGEGYKKIVYKLLPGANKMLPKVFFSAKSIKFYNPSEDILRIRNHSTHTKNGSPQKGYEKFEFNIEDCRKFIDFYKQSISKHPEWKDFGFRFSDTQRYNSIDEFYREVENQGYKLTFENISESYIDSVVNQGKLYLFQIYNKDFSAYSKGRPNLHTLYWKALFDERNLQDVVYKLNGEAELFYRKQSIPKKITHPAKEAIANKNKDNPKKESVFEYDLIKDKRFTEDKFFFHCPITINFKSSGANKFNDEINLLLKEKANDVHILSIDRGERHLAYYTLVDGKGNIIKQDTFNIIGNDRMKTNYHDKLAAIEKDRDSARKDWKKINNIKEMKEGYLSQVVHEIAKLVIEYNAIVVFEDLNFGFKRGRFKVEKQVYQKLEKMLIEKLNYLVFKDNEFDKTGGVLRAYQLTAPFETFKKMGKQTGIIYYVPAGFTSKICPVTGFVNQLYPKYESVSKSQEFFSKFDKICYNLDKGYFEFSFDYKNFGDKAAKGKWTIASFGSRLINFRNSDKNHNWDTREVYPTKELEKLLKDYSIEYGHGECIKAAICGESDKKFFAKLTSVLNTILQMRNSKTGTELDYLISPVADVNGNFFDSRQAPKNMPQDADANGAYHIGLKGLMLLGRIKNNQEGKKLNLVIKNEEYFEFVQNRNN

SEQ ID NO: 30 - DNA, 3041 bp, Artificial Sequence
  plant transformation vector
  misc_feature (1)..(3041): plant transformation vector
  misc_feature (2500)..(2874): MtU6 promoter
  misc_feature (2919)..(2961): guide RNA
  misc_feature (2919)..(2937): mature gRNA hairpin
  misc_feature (2938)..(2961): PsLOX2 targeting gRNA sequence
ggccgcatctatgtcgggtgcggagaaagaggtaatgaaatggcaaagcttggcgtaatcatggtcatagctgtttcctgtgtgaaattgttatccgctcacaattccacacaacatacgagccggaagcataaagtgtaaagcctggggtgcctaatgagtgagctaactcacattaattgcgttgcgctcactgcccgctttccagtcgggaaacctgtcgtgccagctgcattaatgaatcggccaacgcgcggggagaggcggtttgcgtattgggcgctcttccgcttcctcgctcactgactcgctgcgctcggtcgttcggctgcggcgagcggtatcagctcactcaaaggcggtaatacggttatccacagaatcaggggataacgcaggaaagaacatgtgagcaaaaggccagcaaaaggccaggaaccgtaaaaaggccgcgttgctggcgtttttccataggctccgcccccctgacgagcatcacaaaaatcgacgctcaagtcagaggtggcgaaacccgacaggactataaagataccaggcgtttccccctggaagctccctcgtgcgctctcctgttccgaccctgccgcttaccggatacctgtccgcctttctcccttcgggaagcgtggcgctttctcatagctcacgctgtaggtatctcagttcggtgtaggtcgttcgctccaagctgggctgtgtgcacgaaccccccgttcagcccgaccgctgcgccttatccggtaactatcgtcttgagtccaacccggtaagacacgacttatcgccactggcagcagccactggtaacaggattagcagagcgaggtatgtaggcggtgctacagagttcttgaagtggtggcctaactacggctacactagaaggacagtatttggtatctgcgctctgctgaagccagttaccttcggaaaaagagttggtagctcttgatccggcaaacaaaccaccgctggtagcggtggtttttttgtttgcaagcagcagattacgcgcagaaaaaaaggatctcaagaagatcctttgatcttttctacggggtctgacgctcagtggaacgaaaactcacgttaagggattttggtcatgagattatcaaaaaggatcttcacctagatccttttaaattaaaaatgaagttttaaatcaatctaaagtatatatgagtaaacttggtctgacagttaccaatgcttaatcagtgaggcacctatctcagcgatctgtctatttcgttcatccatagttgcctgactccccgtcgtgtagataactacgatacgggagggcttaccatctggccccagtgctgcaatgataccgcgagacccacgctcaccggctccagatttatcagcaataaaccagccagccggaagggccgagcgcagaagtggtcctgcaactttatccgcctccatccagtctattaattgttgccgggaagctagagtaagtagttcgccagttaatagtttgcgcaacgttgttgccattgctacaggcatcgtggtgtcacgctcgtcgtttggtatggcttcattcagctccggttcccaacgatcaaggcgagttacatgatcccccatgttgtgcaaaaaagcggttagctccttcggtcctccgatcgttgtcagaagtaagttggccgcagtgttatcactcatggttatggcagcactgcataattctcttactgtcatgccatccgtaagatgcttttctgtgactggtgagtactcaaccaagtcattctgagaatagtgtatgcggcgaccgagttgctcttgcccggcgtcaatacgggataataccgcgccacatagcagaactttaaaagtgctcatcattggaaaacgttcttcggggcgaaaactctcaaggatcttaccgctgttgagatccagttcgatgtaacccactcgtgcacccaactgatcttcagcatcttttactttcaccagcgtttctgggtgagcaaaaacaggaaggcaaaatgccgcaaaaaagggaataagggcgacacggaaatgttgaatactcatactcttcctttttcaatattattgaagcatttatcagggttattgtctcatgagcggatacatatttgaatgtatttagaaaaataaacaaataggggttccgcgcacatttccccgaaaagtgccacctgacgtctaagaaaccattattatcatgacattaacctataaaaataggcgtatcacgaggccctttcgtctcgcgcgtttcggtgatgacggtgaaaacctctgacacatgcagctcccggagacggtcacagcttgtctgtaagcggatgccgggagcagacaagcccgtcagggcgcgtcagcgggtgttggcgggtgtcggggctggcttaactatgcggcatcagagcagattgtactgagagtgcaccatatgattaccctgttatccctagcgatcgcgattttggctaccttaaggtagcatgcctatcttatatgatcaatgaggcatttaattgggtgcatatgatggtgaaaaaaggtgcagctcctggcttgggaatgatgactcatgtggaatttggtcttaaatttatcacatccttttgggatgtgatgattgtatcacttgttcattttgcaaagacaaggtgcactgctacaaactttggtttaatctgaaataaaacaaaactcactgagaggaagatgcatcccagtaggtgaaagtcgagaaggatttgcatgttactattacacttgctttttagtcccacatcgtctgaaacataaaatatttcagcgtttaaatacttcaagcgaaccagtaggcttggaaattctgatgagtccgtgaggacgaaacgagtaagctcgtcaatttctactgttgtagatgtaccgatggtgaacaagtcctcaggccggcatggtcccagcctcctcgctggcgccggctgggcaacatgcttcggcatggcgaatgggacttttttttttgc

SEQ ID NO: 31 - DNA, 3075 bp, Artificial Sequence
  Plant gRNA expression vector
  misc_feature (1)..(3075): 133911 vector
  misc_feature (896)..(938): guide RNA
  misc_feature (896)..(914): guide RNA hairpin structure
  misc_feature (915)..(938): PG targeting sequence
ctaaattgtaagcgttaatattttgttaaaattcgcgttaaatttttgttaaatcagctcattttttaaccaataggccgaaatcggcaaaatcccttataaatcaaaagaatagaccgagatagggttgagtggccgctacagggcgctcccattcgccattcaggctgcgcaactgttgggaagggcgtttcggtgcgggcctcttcgctattacgccagctggcgaaagggggatgtgctgcaaggcgattaagttgggtaacgccagggttttcccagtcacgacgttgtaaaacgacggccagtgagcgcgacgtaatacgactcactatagggcgaattggcggaaggccgtcaaggccgcatcccgggttgtagctccacgcgcttcggcaggggaagctctacttaatcggaagtccatatgtaactataacggtcctaaggtagcgagcgatcgcctttttttcttcttcttcgttcatacagtttttttttgtttatcagcttacattttcttgaaccgtagctttcgttttcttctttttaactttccattcggagtttttgtatcttgtttcatagtttgtcccaggattagaatgattaggcatcgaaccttcaagaatttgattgaataaaacatcttcattcttaagatatgaagataatcttcaaaaggcccctgggaatctgaaagaagagaagcaggcccatttatatgggaaagaacaatagtatttcttatataggcccatttaagttgaaaacaatcttcaaaagtcccacatcgcttagataagaaaacgaagctgagtttatatacagctagagtcgaagtagtgattggaaattctgatgagtccgtgaggacgaaacgagtaagctcgtcaatttctactgttgtagatgagctaagggtgatggaaaaacatggccggcatggtcccagcctcctcgctggcgccggctgggcaacatgcttcggcatggcgaatgggacttttttttttgcggccgcattaccctgttatccctaaagcttgaattcagtacattaaaaacgtccgcaatgtgttattaagttgtctaagcccgggctgggcctcatgggccttccgctcactgcccgctttccagtcgggaaacctgtcgtgccagctgcattaacatggtcatagctgtttccttgcgtattgggcgctctccgcttcctcgctcactgactcgctgcgctcggtcgttcgggtaaagcctggggtgcctaatgagcaaaaggccagcaaaaggccaggaaccgtaaaaaggccgcgttgctggcgtttttccataggctccgcccccctgacgagcatcacaaaaatcgacgctcaagtcagaggtggcgaaacccgacaggactataaagataccaggcgtttccccctggaagctccctcgtgcgctctcctgttccgaccctgccgcttaccggatacctgtccgcctttctcccttcgggaagcgtggcgctttctcatagctcacgctgtaggtatctcagttcggtgtaggtcgttcgctccaagctgggctgtgtgcacgaaccccccgttcagcccgaccgctgcgccttatccggtaactatcgtcttgagtccaacccggtaagacacgacttatcgccactggcagcagccactggtaacaggattagcagagcgaggtatgtaggcggtgctacagagttcttgaagtggtggcctaactacggctacactagaagaacagtatttggtatctgcgctctgctgaagccagttaccttcggaaaaagagttggtagctcttgatccggcaaacaaaccaccgctggtagcggtggtttttttgtttgcaagcagcagattacgcgcagaaaaaaaggatctcaagaagatcctttgatcttttctacggggtctgacgctcagtggaacgaaaactcacgttaagggattttggtcatgagattatcaaaaaggatcttcacctagatccttttaaattaaaaatgaagttttaaatcaatctaaagtatatatgagtaaacttggtctgacagttaccaatgcttaatcagtgaggcacctatctcagcgatctgtctatttcgttcatccatagttgcctgactccccgtcgtgtagataactacgatacgggagggcttaccatctggccccagtgctgcaatgataccgcgagaaccacgctcaccggctccagatttatcagcaataaaccagccagccggaagggccgagcgcagaagtggtcctgcaactttatccgcctccatccagtctattaattgttgccgggaagctagagtaagtagttcgccagttaatagtttgcgcaacgttgttgccattgctacaggcatcgtggtgtcacgctcgtcgtttggtatggcttcattcagctccggttcccaacgatcaaggcgagttacatgatcccccatgttgtgcaaaaaagcggttagctccttcggtcctccgatcgttgtcagaagtaagttggccgcagtgttatcactcatggttatggcagcactgcataattctcttactgtcatgccatccgtaagatgcttttctgtgactggtgagtactcaaccaagtcattctgagaatagtgtatgcggcgaccgagttgctcttgcccggcgtcaatacgggataataccgcgccacatagcagaactttaaaagtgctcatcattggaaaacgttcttcggggcgaaaactctcaaggatcttaccgctgttgagatccagttcgatgtaacccactcgtgcacccaactgatcttcagcatcttttactttcaccagcgtttctgggtgagcaaaaacaggaaggcaaaatgccgcaaaaaagggaataagggcgacacggaaatgttgaatactcatactcttcctttttcaatattattgaagcatttatcagggttattgtctcatgagcggatacatatttgaatgtatttagaaaaataaacaaataggggttccgcgcacatttccccgaaaagtgccac

SEQ ID NO: 32 - DNA, 3075 bp, Artificial Sequence
  Plant gRNA expression vector
  misc_feature (1)..(3075): 133912 vector
  misc_feature (896)..(938): guide RNA
  misc_feature (896)..(914): guide RNA hairpin region
  misc_feature (915)..(938): PG targeting sequence
ctaaattgtaagcgttaatattttgttaaaattcgcgttaaatttttgttaaatcagctcattttttaaccaataggccgaaatcggcaaaatcccttataaatcaaaagaatagaccgagatagggttgagtggccgctacagggcgctcccattcgccattcaggctgcgcaactgttgggaagggcgtttcggtgcgggcctcttcgctattacgccagctggcgaaagggggatgtgctgcaaggcgattaagttgggtaacgccagggttttcccagtcacgacgttgtaaaacgacggccagtgagcgcgacgtaatacgactcactatagggcgaattggcggaaggccgtcaaggccgcatcccgggttgtagctccacgcgcttcggcaggggaagctctacttaatcggaagtccatatgtaactataacggtcctaaggtagcgagcgatcgcctttttttcttcttcttcgttcatacagtttttttttgtttatcagcttacattttcttgaaccgtagctttcgttttcttctttttaactttccattcggagtttttgtatcttgtttcatagtttgtcccaggattagaatgattaggcatcgaaccttcaagaatttgattgaataaaacatcttcattcttaagatatgaagataatcttcaaaaggcccctgggaatctgaaagaagagaagcaggcccatttatatgggaaagaacaatagtatttcttatataggcccatttaagttgaaaacaatcttcaaaagtcccacatcgcttagataagaaaacgaagctgagtttatatacagctagagtcgaagtagtgattggaaattctgatgagtccgtgaggacgaaacgagtaagctcgtcaatttctactgttgtagatggaaccacaaattgaacaggtgttggccggcatggtcccagcctcctcgctggcgccggctgggcaacatgcttcggcatggcgaatgggacttttttttttgcggccgcattaccctgttatccctaaagcttgaattcagtacattaaaaacgtccgcaatgtgttattaagttgtctaagcccgggctgggcctcatgggccttccgctcactgcccgctttccagtcgggaaacctgtcgtgccagctgcattaacatggtcatagctgtttccttgcgtattgggcgctctccgcttcctcgctcactgactcgctgcgctcggtcgttcgggtaaagcctggggtgcctaatgagcaaaaggccagcaaaaggccaggaaccgtaaaaaggccgcgttgctggcgtttttccataggctccgcccccctgacgagcatcacaaaaatcgacgctcaagtcagaggtggcgaaacccgacaggactataaagataccaggcgtttccccctggaagctccctcgtgcgctctcctgttccgaccctgccgcttaccggatacctgtccgcctttctcccttcgggaagcgtggcgctttctcatagctcacgctgtaggtatctcagttcggtgtaggtcgttcgctccaagctgggctgtgtgcacgaaccccccgttcagcccgaccgctgcgccttatccggtaactatcgtcttgagtccaacccggtaagacacgacttatcgccactggcagcagccactggtaacaggattagcagagcgaggtatgtaggcggtgctacagagttcttgaagtggtggcctaactacggctacactagaagaacagtatttggtatctgcgctctgctgaagccagttaccttcggaaaaagagttggtagctcttgatccggcaaacaaaccaccgctggtagcggtggtttttttgtttgcaagcagcagattacgcgcagaaaaaaaggatctcaagaagatcctttgatcttttctacggggtctgacgctcagtggaacgaaaactcacgttaagggattttggtcatgagattatcaaaaaggatcttcacctagatccttttaaattaaaaatgaagttttaaatcaatctaaagtatatatgagtaaacttggtctgacagttaccaatgcttaatcagtgaggcacctatctcagcgatctgtctatttcgttcatccatagttgcctgactccccgtcgtgtagataactacgatacgggagggcttaccatctggccccagtgctgcaatgataccgcgagaaccacgctcaccggctccagatttatcagcaataaaccagccagccggaagggccgagcgcagaagtggtcctgcaactttatccgcctccatccagtctattaattgttgccgggaagctagagtaagtagttcgccagttaatagtttgcgcaacgttgttgccattgctacaggcatcgtggtgtcacgctcgtcgtttggtatggcttcattcagctccggttcccaacgatcaaggcgagttacatgatcccccatgttgtgcaaaaaagcggttagctccttcggtcctccgatcgttgtcagaagtaagttggccgcagtgttatcactcatggttatggcagcactgcataattctcttactgtcatgccatccgtaagatgcttttctgtgactggtgagtactcaaccaagtcattctgagaatagtgtatgcggcgaccgagttgctcttgcccggcgtcaatacgggataataccgcgccacatagcagaactttaaaagtgctcatcattggaaaacgttcttcggggcgaaaactctcaaggatcttaccgctgttgagatccagttcgatgtaacccactcgtgcacccaactgatcttcagcatcttttactttcaccagcgtttctgggtgagcaaaaacaggaaggcaaaatgccgcaaaaaagggaataagggcgacacggaaatgttgaatactcatactcttcctttttcaatattattgaagcatttatcagggttattgtctcatgagcggatacatatttgaatgtatttagaaaaataaacaaataggggttccgcgcacatttccccgaaaagtgccac

SEQ ID NO: 33 - DNA, 3075 bp, Artificial Sequence
  Plant gRNA expression vector
  misc_feature (1)..(3075): 133914 construct
  misc_feature (896)..(938): guide RNA
  misc_feature (896)..(914): gRNA hairpin region
  misc_feature (915)..(938): PG targeting region
ctaaattgtaagcgttaatattttgttaaaattcgcgttaaatttttgttaaatcagctcattttttaaccaataggccgaaatcggcaaaatcccttataaatcaaaagaatagaccgagatagggttgagtggccgctacagggcgctcccattcgccattcaggctgcgcaactgttgggaagggcgtttcggtgcgggcctcttcgctattacgccagctggcgaaagggggatgtgctgcaaggcgattaagttgggtaacgccagggttttcccagtcacgacgttgtaaaacgacggccagtgagcgcgacgtaatacgactcactatagggcgaattggcggaaggccgtcaaggccgcatcccgggttgtagctccacgcgcttcggcaggggaagctctacttaatcggaagtccatatgtaactataacggtcctaaggtagcgagcgatcgcctttttttcttcttcttcgttcatacagtttttttttgtttatcagcttacattttcttgaaccgtagctttcgttttcttctttttaactttccattcggagtttttgtatcttgtttcatagtttgtcccaggattagaatgattaggcatcgaaccttcaagaatttgattgaataaaacatcttcattcttaagatatgaagataatcttcaaaaggcccctgggaatctgaaagaagagaagcaggcccatttatatgggaaagaacaatagtatttcttatataggcccatttaagttgaaaacaatcttcaaaagtcccacatcgcttagataagaaaacgaagctgagtttatatacagctagagtcgaagtagtgattggaaattctgatgagtccgtgaggacgaaacgagtaagctcgtcaatttctactgttgtagatctagatgcttctaaggatccaaaaggccggcatggtcccagcctcctcgctggcgccggctgggcaacatgcttcggcatggcgaatgggacttttttttttgcggccgcattaccctgttatccctaaagcttgaattcagtacattaaaaacgtccgcaatgtgttattaagttgtctaagcccgggctgggcctcatgggccttccgctcactgcccgctttccagtcgggaaacctgtcgtgccagctgcattaacatggtcatagctgtttccttgcgtattgggcgctctccgcttcctcgctcactgactcgctgcgctcggtcgttcgggtaaagcctggggtgcctaatgagcaaaaggccagcaaaaggccaggaaccgtaaaaaggccgcgttgctggcgtttttccataggctccgcccccctgacgagcatcacaaaaatcgacgctcaagtcagaggtggcgaaacccgacaggactataaagataccaggcgtttccccctggaagctccctcgtgcgctctcctgttccgaccctgccgcttaccggatacctgtccgcctttctcccttcgggaagcgtggcgctttctcatagctcacgctgtaggtatctcagttcggtgtaggtcgttcgctccaagctgggctgtgtgcacgaaccccccgttcagcccgaccgctgcgccttatccggtaactatcgtcttgagtccaacccggtaagacacgacttatcgccactggcagcagccactggtaacaggattagcagagcgaggtatgtaggcggtgctacagagttcttgaagtggtggcctaactacggctacactagaagaacagtatttggtatctgcgctctgctgaagccagttaccttcggaaaaagagttggtagctcttgatccggcaaacaaaccaccgctggtagcggtggtttttttgtttgcaagcagcagattacgcgcagaaaaaaaggatctcaagaagatcctttgatcttttctacggggtctgacgctcagtggaacgaaaactcacgttaagggattttggtcatgagattatcaaaaaggatcttcacctagatccttttaaattaaaaatgaagttttaaatcaatctaaagtatatatgagtaaacttggtctgacagttaccaatgcttaatcagtgaggcacctatctcagcgatctgtctatttcgttcatccatagttgcctgactccccgtcgtgtagataactacgatacgggagggcttaccatctggccccagtgctgcaatgataccgcgagaaccacgctcaccggctccagatttatcagcaataaaccagccagccggaagggccgagcgcagaagtggtcctgcaactttatccgcctccatccagtctattaattgttgccgggaagctagagtaagtagttcgccagttaatagtttgcgcaacgttgttgccattgctacaggcatcgtggtgtcacgctcgtcgtttggtatggcttcattcagctccggttcccaacgatcaaggcgagttacatgatcccccatgttgtgcaaaaaagcggttagctccttcggtcctccgatcgttgtcagaagtaagttggccgcagtgttatcactcatggttatggcagcactgcataattctcttactgtcatgccatccgtaagatgcttttctgtgactggtgagtactcaaccaagtcattctgagaatagtgtatgcggcgaccgagttgctcttgcccggcgtcaatacgggataataccgcgccacatagcagaactttaaaagtgctcatcattggaaaacgttcttcggggcgaaaactctcaaggatcttaccgctgttgagatccagttcgatgtaacccactcgtgcacccaactgatcttcagcatcttttactttcaccagcgtttctgggtgagcaaaaacaggaaggcaaaatgccgcaaaaaagggaataagggcgacacggaaatgttgaatactcatactcttcctttttcaatattattgaagcatttatcagggttattgtctcatgagcggatacatatttgaatgtatttagaaaaataaacaaataggggttccgcgcacatttccccgaaaagtgccac

SEQ ID NO: 34 - DNA, 6796 bp, Solanum lycopersicum
  misc_feature (1)..(6796): PG2 gene
aggttgagccgcatatttaggaggacactttcaatagtatttttttcaagcatgaatttgaaatttaagattaatggtaaagaagtagtacatcccgaattaattcatgccttttttaaatataattatataaatatttatgatttgttttaaatattaaaacttgaatatattatttttaaaaaaattatctattaagtaccatcacataattgagacgaaggaataattaagatgaacatagtgtttaattagtaatggatgggtagtaaatttatttataaattatatcaataagttaaattataacaaatatttgagcgccatgtattttaaaaaatattaaatagtttgaatttaaaaccgttagataaatggtcaattttgaacccaaaagtggatgagaagggtattttagagccaatagggggatgagaaggatattttgaagccaatatgtgatggatggaggataattttgtatcatttctaatactttaaagatattttaggtcattttcccttctttagtttatagactatagtgttagttcatcgaatatcatctattatttccgtcttaaattattttttattttataaatttttaaaaaataaattattttttccatttaactttgattgtaattaatttttaaaaattaccaacatataaataaaattaatatttaacaaagaattgtaacataatatttttttaattattcaaaataaatatttttaaacatcatataaaagaaatacgacaaaaaaattgagacgggagaagacaagccagacaaaaatgtccaagaaactctttcgtctaaatatctctcatccaaactaatataatacccattacaattaaccatattgaccaactcaaaccccttaaaatctataaatagacaaacccttcccatacctcttatcataaaaaaaataataatctttttcaatagacaagtttaaaaaccataccatataacaatatatcatggttatccaaaggaatagtattctccttctcattattatttttgcttcatcaatttcaacttgtagaagcaatgttattgatgacaatttattcaaacaagtttatgataatattcttgaacaagaatttgctcatgattttcaagcttatctttcttatttgagcaaaaatattgaaagcaacaataatattgacaaggttgataaaaatgggattaaagtgattaatgtacttagctttggagctaagggtgatggaaaaacatatgataatattgtaagtatttaaatattggaatatatttgtggggatgaaaatgatagagaatataagaattatttggaaggatgaaaagttatattttataaagtagaaaattattttctcgtttttagtaattaaaggtgaaaaatgagttttctcgtaagcgaggaaagtcattttccatggaactgtattttttttttacttttaataacgtcatagtatttgctatactcaagaataagacactattattgatgtttagtgctcgaaaagaaattgatagtaattttgctaatataactatcaatttcttatatgtatatttttcaaccaaaataacaaagcgtaatccaataagtgggcctctagaataaagagtaagttctattaattcttaaccttatttaattttatggaaacctcgacaaaacgacaatgctcaacttatattcgaattcgagaccaaccatatgaacaacctcacacatgcatatagtcctaatatatataatttttctaaaaaatatcttcaatctaccatattgaaatattgaaaaatgacttttatcctatcgaacacataatcaagagtttcttttaagaatttaccactacatttggtagtgtttcttatcgtgttaaaattatctttcaggcatttgagcaagcatggaatgaagcatgttcatctagaacacctgttcaatttgtggttcctaaaaacaagaattatcttctcaagcaaatcaccttttcaggtccatgcagatcttctatttcagtaaaggttagcatattgattatttatatcctctttgttagcaatatattatctggtttatgacaaaatttaagaaagtaatcaaagatagctaaacaatgaattttcgtcactaatttagcggattagtgaggaattatcaaaatgttatgttagctatgagcaacttagctatgaattagctagtgaagaagtttgatgctaattctatttttttttgtagagtaaagatatttgaaacacatgtattaattattaattatgtcttaattaatatgtcaagtggatagttcaaactaaagaactgtcaaaagaaaataagaaagaaatatttatttttaaaataaattaaaaagaaaaatatgagaaataaattcaaagcgagaaggtattacataatcataggggataaaaaggatattatatagtaaagaaaaacaacaactacaacatatctaataaagtctcataaatggatataaaaaaagtattgtgtaagcaaacattatccctacaaaaacttttgtggggtagatcgatccagaggttgtttccagactcttggcttaaaaaaaatgttttttttctaaataagtttgaaagaaatgttatatgatgaaaatatgaaagaaaaaacatatcaatattaaaaaataataaaagtaatcaaagtaaacgaaataacaataggaataatactcataaatgaaaatttagtggctttcgtactacataatcttagtttattcattgtttctttaatttcccttcttattttttttgaaattactatgcagatttttggatccttagaagcatctagtaaaatttcagactacaaagatagaaggctttggattgcttttgatagtgttcaaaatttagttgttggaggaggaggaactatcaatggcaatggacaagtatggtggccaagttcttgcaaaataaataaatcactggtaattttataaccttgcttataagttttacgctatgttgctcgaattctttaaacttgttctaaagatattatatatttgaaggaggtgtcacaaatgcatcacatttttagagattccgaccaatattagttttatgtaatctaattttcagagcatctttgccttgtactgatcattgttaccctttttttcttcatgcagccatgcagggatgcaccaacggtacgttaattcatttgatttgataaaaaaaaaagcctaaaatatatttgaattttaattgaaattgttataataattcttaactttgggcaggacctattacccctttgcactatttaatagtgtattttaaagatataaaagtgtttagttgaaacaaaaatttagatattcaaaaactatttgaaaattactataaattgcaatttttttgcatatcaatatgattaaaaaatattagttaaagttcttatgatttgattctaaaaataaaaatcatgacaaacaatagtagacggagaaagtatataacaatacctcttcaagtagaatcgatttgtacacacacctcaaaacctacgtttcttcgattatattttcctatttcttttaatagttttaatcaaagctattagttctgtcaaatctatacattgaaactctatctttgacgcctctgacattcgagatcgttgatttacaatggatgaatgattatttaactttctatttaaatattaaaactaatattgtttaattttcaggccttaaccttctggaattgcaaaaatttgaaagtgaataatctaaagagtaaaaatgcacaacaaattcatatcaaatttgagtcatgcactaatgttgtagcttcaaatttgatgatcaatgcttcagcaaagagcccaaatactgatggagtccatgtatcaaatactcaatatattcaaatatctgatactattattggaacaggtttatttatttaatttttatttatccaatttaattagaaaaaaaaaggagtatttttatttgataactaaattattaatttttaatttttttttataggtgatgattgtatttcaattgtttctggatctcaaaatgtgcaggccacaaatattacttgtggtccaggtcatggtataaggtactctattttacaaatatacttgtttccattttctctatttcataaaaggtagtatgatataataattactttaaatcctttaattaatttattggcaaattttttctcttgtctttatggttaatgacttagcacaataattagggcccgtttggatgggcgtaataaaagcagctttaaaaaagtacttttaaaagtgttgaaacttatttttaaaataagcagttatgcgtttggataaaagtgctgaagttgttatgtcaaacgtgaaaagggaaaaatggaagaaagaaatgttagggttatatgggtaatttggagattgtataaatatattaagcacaaaaagatataaatgtggtcaacttaaaacaacttataagctaaaaaaaaagcaccctaccccagcttttaacttttggcttaaaataagtttttttttttaaacttaaaataagttgttttgagtattgccaaacagctaaataagtcaaaaaccagcttttaagtcaggttgaccagcttttaagctgagccaaacaggctcttaaaatgtctgcttagatgtgctatatatatttgagctttttttgaagtagtatattatccttaagttcaacataaaaatacatgctttaacatagcacatatagttaatcaaaagacgaaatgatgaataattttgcgaatttgattattcacaagaaaagggatagttcaaagtgtacatttcaagtaattgaagatatcataaagactaaaattagaagaactaataattgagggatcaaaaatgttattaccttattaaaatactattccattttcatattaaattaactaattaagagtgttttataatctaataaaacatgcaataattattgacgaaatgtggttttggtacctataatctttctgaatatttgctcttattttttctctttttatttttccatggattagtattggaagcttaggatctggaaattcagaagcttatgtgtctaatgttactgtaaatgaagccaaaattatcggtgccgaaaatggagttaggatcaagacttggcaggtaccctccccccccccccccacacgcacatttttttaattttttttaaatttataatcgaatatcaatattaaaatatgattaaatttgatttcatgtttgaaaatttatatttggaataaaagtatgtattttactagctttctatgttatatagaaaaaaatgttcagaacttcagattattgtactcgtactaagtgtaaatgtgttgctttgtttagaagtttggtttatccagttttgggtcatgattaaaccaaacttataatgaaaaggggctgcaacggccggtcccactagtgctagtatcaataggaagatctcacgtctgtttattcagatggacgttcttggttgaatgttaataattataaatttaattaacatgtaattaagcattatataaattaatataatgtggtttaataatgtagggaggatctggacaagctagcaacatcaaatttctgaatgtggaaatgcaagacgttaagtatcccataattatagaccaaaactattgtgatcgagttgaaccatgtatacaacaggtaattttttattaacgaacaatttattatattttattacttcttaaatcaccttacatcattaaaactttgagattcttttcactagttagtaactttttgaatagatttttagtaaatgatattcattattccttttatttttcttctaatttatggatcttttggactatggtctaaaaatcttgttaaagtaaactgaatatcataagaaaaaatgttagattataatctaaattttttataaattattagacgttatctaatattttgtatgtaagattgagaaacatatacataaaacattagattcaaatttaataatatctaaaatattgattcaaatcaatcatgactacacaaacgaatacatgcagattctcaaacatatagatgaagtcatttcaaaacgaatcaaatatagtagagtatatccttaaaagagagcatttgggtaaataagtaaaaatcattaagttataaaaaaaattctaactcgatctctcacgattatttaatcactttgtttgttccagttttcagcagttcaagtgaaaaatgtggtgtatgagaatatcaagggcacaagtgcaacaaaggtggccataaaatttgattgcagcacaaactttccatgtgaaggaattataatggagaatataaatttagtaggggaaagtggaaaaccatcagaggctacgtgcaaaaatgtccattttaacaatgctgaacatgttacaccacactgcacttcactagaaatttcagaggatgaagctcttttgtataattattaatttatactatagatcttcaatatatagcagatatgatatatcacaataaacaaatctatatctatgtattgaataattattattaatatgtacggattgaagttttaataagactactatgtatttctattttctagtcaaaagtttgacgattgtactttttaatgtacaaaaataataaaatggttatttatatg

SEQ ID NO: 35 - protein, 1285 aa, Artificial Sequence
  Synthetic sequence
MAPKKKRKVMLFQDFTHLYPLSKTMRFELKPIGKTLEHIHAKNFLSQDETMADMYQKVKAILDDYHRDFIADMMGEVKLTKLAEFYDVYLKFRKNPKDDGLQKQLKDLQAVLRKEIVKPIGNGGKYKAGYDRLFGAKLFKDGKELGDLAKFVIAQEGESSPKLAHLAHFEKFSTYFTGFHRNRKNMYSDEDKHTAITYRLIHENLPRFIDNLQILATIKQKHSALYDQIINELTASGLDVSLASHLDGYHKLLTQEGITAYNTLLGGISGEAGSRKIQGINELINSHHNQHCHKSERIAKLRPLHKQILSDGMGVSFLPSKFADDSEMCQAVNEFYRHYADVFAKVQSLFDGFDDHQKDGIYVEHKNLNELSKQAFGDFALLGRVLDGYYVDVVNPEFNERFAKAKTDNAKAKLTKEKDKFIKGVHSLASLEQAIEHYTARHDDESVQAGKLGQYFKHGLAGVDNPIQKIHNNHSTIKGFLERERPAGERALPKIKSGKNPEMTQLRQLKELLDNALNVAHFAKLLTTKTTLDNQDGNFYGEFGALYDELAKIPTLYNKVRDYLSQKPFSTEKYKLNFGNPTLLNGWDLNKEKDNFGIILQKDGCYYLALLDKAHKKVFDNAPNTGKNVYQKMIYKLLPGPNKMLPKVFFAKSNLDYYNPSAELLDKYAQGTHKKGNNFNLKDCHALIDFFKAGINKHPEWQHFGFKFSPTSSYQDLSDFYREVEPQGYQVKFVDINADYINELVEQGQLYLFQIYNKDFSPKAHGKPNLHTLYFKALFSKDNLANPIYKLNGEAQIFYRKASLDMNETTIHRAGEVLENKNPDNPKKRQFVYDIIKDKRYTQDKFMLHVPITMNFGVQGMTIKEFNKKVNQSIQQYDEVNVIGIDRGERHLLYLTVINSKGEILEQRSLNDITTASANGTQMTTPYHKILDKREIERLNARVGWGEIETIKELKSGYLSHVVHQISQLMLKYNAIVVLEDLNFGFKRGRFKVEKQIYQNFENALIKKLNHLVLKDEADDEIGSYKNALQLTNNFTDLKSIGKQTGFLFYVPAWNTSKIDPETGFVDLLKPRYENIAQSQAFFGKFDKICYNADKDYFEFHIDYAKFTDKAKNSRQIWKICSHGDKRYVYDKTANQNKGATKGINVNDELKSLFARHHINDKQPNLVMDICQNNDKEFHKSLIYLLKTLLALRYSNASSDEDFILSPVANDEGMFFNSALADDTQPQNADANGAYHIALKGLWVLEQIKNSDDLNKVKLAIDNQTWLNFAQNRSAHHHHHHHHHH

SEQ ID NO: 36 - protein, 1276 aa, Artificial Sequence
  Synthetic sequence
MAPKKKRKVMQINNLKIIYMKFTDFTGLYSLSKTLRFELKPIGKTLENIKKAGLLEQDQHRADSYKKVKKIIDEYHKAFIEKSLSNFELKYQSEDKLDSLEEYLMYYSMKRIEKTEKDKFAKIQDNLRKQIADHLKGDESYKTIFSKDLIRKNLPDFVKSDEERTLIKEFKDFTTYFKGFYRNRENMYSAEDKSTAISHRIIHENLPKFVDNINAFSKIILIPELREKLNQIYQDFEEYLNVESIDEIFHLDYFSMVMTQKQIEVYNAIIGGKSTNDKKIQGLNEYINLYNQKHKDCKLPKLKLLFKQILSDRIAISWLPDNFKDDQEALDSIDTCYKNLLNDGNVLGEGNLKLLLENIDTYNLKGIFIRNDLQLTDISQKMYASWNVIQDAVILDLKKQVSRKKKESAEDYNDRLKKLYTSQESFSIQYLNDCLRAYGKTENIQDYFAKLGAVNNEHEQTINLFAQVRNAYTSVQAILTTPYPENANLAQDKETVALIKNLLDSLKRLQRFIKPLLGKGDESDKDERFYGDFTPLWETLNQITPLYNMVRNYMTRKPYSQEKIKLNFENSTLLGGWDLNKEHDNTAIILRKNGLYYLAIMKKSANKIFDKDKLDNSGDCYEKMVYKLLPGANKMLPKVFFSKSRIDEFKPSENIIENYKKGTHKKGANFNLADCHNLIDFFKSSISKHEDWSKFNFHFSDTSSYEDLSDFYREVEQQGYSISFCDVSVEYINKMVEKGDLYLFQIYNKDFSEFSKGTPNMHTLYWNSLFSKENLNNIIYKLNGQAEIFFRKKSLNYKRPTHPAHQAIKNKNKCNEKKESIFDYDLVKDKRYTVDKFQFHVPITMNFKSTGNTNINQQVIDYLRTEDDTHIIGIDRGERHLLYLVVIDSHGKIVEQFTLNEIVNEYGGNIYRTNYHDLLDTREQNREKARESWQTIENIKELKEGYISQVIHKITDLMQKYHAVVVLEDLNMGFMRGRQKVEKQVYQKFEEMLINKLNYLVNKKADQNSAGGLLHAYQLTSKFESFQKLGKQSGFLFYIPAWNTSKIDPVTGFVNLFDTRYESIDKAKAFFGKFDSIRYNADKDWFEFAFDYNNFTTKAEGTRTNWTICTYGSRIRTFRNQAKNSQWDNEEIDLTKAYKAFFAKHGINIYDNIKEAIAMETEKSFFEDLLHLLKLTLQMRNSITGTTTDYLISPVHDSKGNFYDSRICDNSLPANADANGAYNIARKGLMLIQQIKDSTSSNRFKFSPITNKDWLIFAQEKPYLNDHHHHHHHHHH

SEQ ID NO: 37 - protein, 1249 aa, Artificial Sequence
  Synthetic sequence
MAPKKKRKVMHENNGKIADNFIGIYPVSKTLRFELKPVGKTQEYIEKHGILDEDLKRAGDYKSVKKIIDAYHKYFIDEALNGIQLDGLKNYYELYEKKRDNNEEKEFQKIQMSLRKQIVKRFSEHPQYKYLFKKELIKNVLPEFTKDNAEEQTLVKSFQEFTTYFEGFHRNRKNMYSDEEKSTAIAYRVVHQNLPKYIDNMRIFSMILNTDIRSDLTELFNNLKTKMDITIVEEYFAIDGFNKVVNQKGIDVYNTILGAFSTDDNTKIKGLNEYINLYNQKNKAKLPKLKPLFKQILSDRDKISFIPEQFDSDTEVLEAVDMFYNRLLQFVIENEGQITISKLLTNFSAYDLNKIYVKNDTTISAISNDLFDDWSYISKAVRENYDSENVDKNKRAAAYEEKKEKALSKIKMYSIEELNFFVKKYSCNECHIEGYFERRILEILDKMRYAYESCKILHDKGLINNISLCQDRQAISELKDFLDSIKEVQWLLKPLMIGQEQADKEEAFYTELLRIWEELEPITLLYNKVRNYVTKKPYTLEKVKLNFYKSTLLDGWDKNKEKDNLGIILLKDGQYYLGIMNRRNNKIADDAPLAKTDNVYRKMEYKLLTKVSANLPRIFLKDKYNPSEEMLEKYEKGTHLKGENFCIDDCRELIDFFKKGIKQYEDWGQFDFKFSDTESYDDISAFYKEVEHQGYKITFRDIDETYIDSLVNEGKLYLFQIYNKDFSPYSKGTKNLHTLYWEMLFSQQNLQNIVYKLNGNAEIFYRKASINQKDVVVHKADLPIKNKDPQNSKKESMFDYDIIKDKRFTCDKYQFHVPITMNFKALGENHFNRKVNRLIHDAENMHIIGIDRGERNLIYLCMIDMKGNIVKQISLNEIISYDKNKLEHKRNYHQLLKTREDENKSARQSWQTIHTIKELKEGYLSQVIHVITDLMVEYNAIVVLEDLNFGFKQGRQKFERQVYQKFEKMLIDKLNYLVDKSKGMDEDGGLLHAYQLTDEFKSFKQLGKQSGFLYYIPAWNTSKLDPTTGFVNLFYTKYESVEKSKEFINNFTSILYNQEREYFEFLFDYSAFTSKAEGSRLKWTVCSKGERVETYRNPKKNNEWDTQKIDLTFELKKLFNDYSISLLDGDLREQMGKIDKADFYKKFMKLFALIVQMRNSDEREDKLISPVLNKYGAFFETGKNERMPLDADANGAYNIARKGLWIIEKIKNTDVEQLDKVKLTISNKEWLQYAQEHILHHHHHHHHHH

SEQ ID NO: 38 - protein, 1285 aa, Artificial Sequence
  Synthetic sequence
MAPKKKRKVMLFQDFTHLYPLSKTMRFELKPIGKTLEHIHAKNFLSQDETMADMYQKVKAILDDYHRDFIADMMGEVKLTKLAEFYDVYLKFRKNPKDDGLQKQLKDLQAVLRKEIVKPIGNGGKYKAGYDRLFGAKLFKDGKELGDLAKFVIAQEGESSPKLAHLAHFEKFSTYFTGFHDNRKNMYSDEDKHTAITYRLIHENLPRFIDNLQILATIKQKHSALYDQIINELTASGLDVSLASHLDGYHKLLTQEGITAYNTLLGGISGEAGSRKIQGINELINSHHNQHCHKSERIAKLRPLHKQILSDGMGVSFLPSKFADDSEMCQAVNEFYRHYADVFAKVQSLFDGFDDHQKDGIYVEHKNLNELSKQAFGDFALLGRVLDGYYVDVVNPEFNERFAKAKTDNAKAKLTKEKDKFIKGVHSLASLEQAIEHYTARHDDESVQAGKLGQYFKHGLAGVDNPIQKIHNNHSTIKGFLERERPAGERALPKIKSGKNPEMTQLRQLKELLDNALNVAHFAKLLTTKTTLDNQDGNFYGEFGALYDELAKIPTLYNKVRDYLSQKPFSTEKYKLNFGNPTLLNGWDLNKEKDNFGIILQKDGCYYLALLDKAHKKVFDNAPNTGKNVYQKMIYKLLPGPNKMLPKVFFAKSNLDYYNPSAELLDKYAQGTHKKGNNFNLKDCHALIDFFKAGINKHPEWQHFGFKFSPTSSYQDLSDFYREVEPQGYQVKFVDINADYINELVEQGQLYLFQIYNKDFSPKAHGKPNLHTLYFKALFSKDNLANPIYKLNGEAQIFYRKASLDMNETTIHRAGEVLENKNPDNPKKRQFVYDIIKDKRYTQDKFMLHVPITMNFGVQGMTIKEFNKKVNQSIQQYDEVNVIGIDRGERHLLYLTVINSKGEILEQRSLNDITTASANGTQMTTPYHKILDKREIERLNARVGWGEIETIKELKSGYLSHVVHQISQLMLKYNAIVVLEDLNFGFKRGRFKVEKQIYQNFENALIKKLNHLVLKDEADDEIGSYKNALQLTNNFTDLKSIGKQTGFLFYVPAWNTSKIDPETGFVDLLKPRYENIAQSQAFFGKFDKICYNADKDYFEFHIDYAKFTDKAKNSRQIWKICSHGDKRYVYDKTANQNKGATKGINVNDELKSLFARHHINDKQPNLVMDICQNNDKEFHKSLIYLLKTLLALRYSNASSDEDFILSPVANDEGMFFNSALADDTQPQNADANGAYHIALKGLWVLEQIKNSDDLNKVKLAIDNQTWLNFAQNRSAHHHHHHHHHH

SEQ ID NO: 39 - protein, 1264 aa, Artificial Sequence
  Synthetic sequence
MLFQDFTHLYPLSKTMRFELKPIGKTLEHIHAKNFLSQDETMADMYQKVKAILDDYHRDFIADMMGEVKLTKLAEFYDVYLKFRKNPKDDGLQKQLKDLQAVLRKEIVKPIGNGGKYKAGYDRLFGAKLFKDGKELGDLAKFVIAQEGESSPKLAHLAHFEKFSTYFTRFHDNRKNMYSDEDKHTAITYRLIHENLPRFIDNLQILATIKQKHSALYDQIINELTASGLDVSLASHLDGYHKLLTQEGITAYNTLLGGISGEAGSRKIQGINELINSHHNQHCHKSERIAKLRPLHKQILSDGMGVSFLPSKFADDSEMCQAVNEFYRHYADVFAKVQSLFDGFDDHQKDGIYVEHKNLNELSKQAFGDFALLGRVLDGYYVDVVNPEFNERFAKAKTDNAKAKLTKEKDKFIKGVHSLASLEQAIEHYTARHDDESVQAGKLGQYFKHGLAGVDNPIQKIHNNHSTIKGFLERERPAGERALPKIKSGKNPEMTQLRQLKELLDNALNVAHFAKLLTTKTTLDNQDGNFYGEFGALYDELAKIPTLYNKVRDYLSQKPFSTEKYKLNFGNPTLLNGWDLNKEKDNFGIILQKDGCYYLALLDKAHKKVFDNAPNTGKNVYQKMIYKLLPGPNKMLPKVFFAKSNLDYYNPSAELLDKYAQGTHKKGNNFNLKDCHALIDFFKAGINKHPEWQHFGFKFSPTSSYQDLSDFYREVEPQGYQVKFVDINADYINELVEQGQLYLFQIYNKDFSPKAHGKPNLHTLYFKALFSKDNLANPIYKLNGEAQIFYRKASLDMNETTIHRAGEVLENKNPDNPKKRQFVYDIIKDKRYTQDKFMLHVPITMNFGVQGMTIKEFNKKVNQSIQQYDEVNVIGIDRGERHLLYLTVINSKGEILEQRSLNDITTASANGTQMTTPYHKILDKREIERLNARVGWGEIETIKELKSGYLSHVVHQISQLMLKYNAIVVLEDLNFGFKRGRFKVEKQIYQNFENALIKKLNHLVLKDEADDEIGSYKNALQLTNNFTDLKSIGKQTGFLFYVPAWNTSKIDPETGFVDLLKPRYENIAQSQAFFGKFDKICYNADKDYFEFHIDYAKFTDKAKNSRQIWKICSHGDKRYVYDKTANQNKGATKGINVNDELKSLFARHHINDKQPNLVMDICQNNDKEFHKSLIYLLKTLLALRYSNASSDEDFILSPVANDEGMFFNSALADDTQPQNADANGAYHIALKGLWVLEQIKNSDDLNKVKLAIDNQTWLNFAQNR

SEQ ID NO: 40 - protein, 1264 aa, Artificial Sequence
  Synthetic sequence
MLFQDFTHLYPLSKTMRFELKPIGKTLEHIHAKNFLSQDETMADMYQKVKAILDDYHRDFIADMMGEVKLTKLAEFYDVYLKFRKNPKDDGLQKQLKDLQAVLRKEIVKPIGNGGKYKAGYDRLFGAKLFKDGKELGDLAKFVIAQEGESSPKLAHLAHFEKFSTYFTGFHDNRKRMYSDEDKHTAITYRLIHENLPRFIDNLQILATIKQKHSALYDQIINELTASGLDVSLASHLDGYHKLLTQEGITAYNTLLGGISGEAGSRKIQGINELINSHHNQHCHKSERIAKLRPLHKQILSDGMGVSFLPSKFADDSEMCQAVNEFYRHYADVFAKVQSLFDGFDDHQKDGIYVEHKNLNELSKQAFGDFALLGRVLDGYYVDVVNPEFNERFAKAKTDNAKAKLTKEKDKFIKGVHSLASLEQAIEHYTARHDDESVQAGKLGQYFKHGLAGVDNPIQKIHNNHSTIKGFLERERPAGERALPKIKSGKNPEMTQLRQLKELLDNALNVAHFAKLLTTKTTLDNQDGNFYGEFGALYDELAKIPTLYNKVRDYLSQKPFSTEKYKLNFGNPTLLNGWDLNKEKDNFGIILQKDGCYYLALLDKAHKKVFDNAPNTGKNVYQKMIYKLLPGPNKMLPKVFFAKSNLDYYNPSAELLDKYAQGTHKKGNNFNLKDCHALIDFFKAGINKHPEWQHFGFKFSPTSSYQDLSDFYREVEPQGYQVKFVDINADYINELVEQGQLYLFQIYNKDFSPKAHGKPNLHTLYFKALFSKDNLANPIYKLNGEAQIFYRKASLDMNETTIHRAGEVLENKNPDNPKKRQFVYDIIKDKRYTQDKFMLHVPITMNFGVQGMTIKEFNKKVNQSIQQYDEVNVIGIDRGERHLLYLTVINSKGEILEQRSLNDITTASANGTQMTTPYHKILDKREIERLNARVGWGEIETIKELKSGYLSHVVHQISQLMLKYNAIVVLEDLNFGFKRGRFKVEKQIYQNFENALIKKLNHLVLKDEADDEIGSYKNALQLTNNFTDLKSIGKQTGFLFYVPAWNTSKIDPETGFVDLLKPRYENIAQSQAFFGKFDKICYNADKDYFEFHIDYAKFTDKAKNSRQIWKICSHGDKRYVYDKTANQNKGATKGINVNDELKSLFARHHINDKQPNLVMDICQNNDKEFHKSLIYLLKTLLALRYSNASSDEDFILSPVANDEGMFFNSALADDTQPQNADANGAYHIALKGLWVLEQIKNSDDLNKVKLAIDNQTWLNFAQNR

SEQ ID NO: 41 - protein, 1264 aa, Artificial Sequence
  Synthetic sequence
MLFQDFTHLYPLSKTMRFELKPIGKTLEHIHAKNFLSQDETMADMYQKVKAILDDYHRDFIADMMGEVKLTKLAEFYDVYLKFRKNPKDDGLQKQLKDLQAVLRKEIVKPIGNGGKYKAGYDRLFGAKLFKDGKELGDLAKFVIAQEGESSPKLAHLAHFEKFSTYFTGFHKNRKNMYSDEDKHTAITYRLIHENLPRFIDNLQILATIKQKHSALYDQIINELTASGLDVSLASHLDGYHKLLTQEGITAYNTLLGGISGEAGSRKIQGINELINSHHNQHCHKSERIAKLRPLHKQILSDGMGVSFLPSKFADDSEMCQAVNEFYRHYADVFAKVQSLFDGFDDHQKDGIYVEHKNLNELSKQAFGDFALLGRVLDGYYVDVVNPEFNERFAKAKTDNAKAKLTKEKDKFIKGVHSLASLEQAIEHYTARHDDESVQAGKLGQYFKHGLAGVDNPIQKIHNNHSTIKGFLERERPAGERALPKIKSGKNPEMTQLRQLKELLDNALNVAHFAKLLTTKTTLDNQDGNFYGEFGALYDELAKIPTLYNKVRDYLSQKPFSTEKYKLNFGNPTLLNGWDLNKEKDNFGIILQKDGCYYLALLDKAHKKVFDNAPNTGKNVYQKMIYKLLPGPNKMLPKVFFAKSNLDYYNPSAELLDKYAQGTHKKGNNFNLKDCHALIDFFKAGINKHPEWQHFGFKFSPTSSYQDLSDFYREVEPQGYQVKFVDINADYINELVEQGQLYLFQIYNKDFSPKAHGKPNLHTLYFKALFSKDNLANPIYKLNGEAQIFYRKASLDMNETTIHRAGEVLENKNPDNPKKRQFVYDIIKDKRYTQDKFMLHVPITMNFGVQGMTIKEFNKKVNQSIQQYDEVNVIGIDRGERHLLYLTVINSKGEILEQRSLNDITTASANGTQMTTPYHKILDKREIERLNARVGWGEIETIKELKSGYLSHVVHQISQLMLKYNAIVVLEDLNFGFKRGRFKVEKQIYQNFENALIKKLNHLVLKDEADDEIGSYKNALQLTNNFTDLKSIGKQTGFLFYVPAWNTSKIDPETGFVDLLKPRYENIAQSQAFFGKFDKICYNADKDYFEFHIDYAKFTDKAKNSRQIWKICSHGDKRYVYDKTANQNKGATKGINVNDELKSLFARHHINDKQPNLVMDICQNNDKEFHKSLIYLLKTLLALRYSNASSDEDFILSPVANDEGMFFNSALADDTQPQNADANGAYHIALKGLWVLEQIKNSDDLNKVKLAIDNQTWLNFAQNR

SEQ ID NO: 42 - protein, 1264 aa, Artificial Sequence
  Synthetic sequence
MLFQDFTHLYPLSKTMRFELKPIGKTLEHIHAKNFLSQDETMADMYQKVKAILDDYHRDFIADMMGEVKLTKLAEFYDVYLKFRKNPKDDGLQKQLKDLQAVLRKEIVKPIGNGGKYKAGYDRLFGAKLFKDGKELGDLAKFVIAQEGESSPKLAHLAHFEKFSTYFTGFHHNRKNMYSDEDKHTAITYRLIHENLPRFIDNLQILATIKQKHSALYDQIINELTASGLDVSLASHLDGYHKLLTQEGITAYNTLLGGISGEAGSRKIQGINELINSHHNQHCHKSERIAKLRPLHKQILSDGMGVSFLPSKFADDSEMCQAVNEFYRHYADVFAKVQSLFDGFDDHQKDGIYVEHKNLNELSKQAFGDFALLGRVLDGYYVDVVNPEFNERFAKAKTDNAKAKLTKEKDKFIKGVHSLASLEQAIEHYTARHDDESVQAGKLGQYFKHGLAGVDNPIQKIHNNHSTIKGFLERERPAGERALPKIKSGKNPEMTQLRQLKELLDNALNVAHFAKLLTTKTTLDNQDGNFYGEFGALYDELAKIPTLYNKVRDYLSQKPFSTEKYKLNFGNPTLLNGWDLNKEKDNFGIILQKDGCYYLALLDKAHKKVFDNAPNTGKNVYQKMIYKLLPGPNKMLPKVFFAKSNLDYYNPSAELLDKYAQGTHKKGNNFNLKDCHALIDFFKAGINKHPEWQHFGFKFSPTSSYQDLSDFYREVEPQGYQVKFVDINADYINELVEQGQLYLFQIYNKDFSPKAHGKPNLHTLYFKALFSKDNLANPIYKLNGEAQIFYRKASLDMNETTIHRAGEVLENKNPDNPKKRQFVYDIIKDKRYTQDKFMLHVPITMNFGVQGMTIKEFNKKVNQSIQQYDEVNVIGIDRGERHLLYLTVINSKGEILEQRSLNDITTASANGTQMTTPYHKILDKREIERLNARVGWGEIETIKELKSGYLSHVVHQISQLMLKYNAIVVLEDLNFGFKRGRFKVEKQIYQNFENALIKKLNHLVLKDEADDEIGSYKNALQLTNNFTDLKSIGKQTGFLFYVPAWNTSKIDPETGFVDLLKPRYENIAQSQAFFGKFDKICYNADKDYFEFHIDYAKFTDKAKNSRQIWKICSHGDKRYVYDKTANQNKGATKGINVNDELKSLFARHHINDKQPNLVMDICQNNDKEFHKSLIYLLKTLLALRYSNASSDEDFILSPVANDEGMFFNSALADDTQPQNADANGAYHIALKGLWVLEQIKNSDDLNKVKLAIDNQTWLNFAQNR

SEQ ID NO: 43 - protein, 1264 aa, Artificial Sequence
  Synthetic sequence
MLFQDFTHLYPLSKTMRFELKPIGKTLEHIHAKNFLSQDETMADMYQKVKAILDDYHRDFIADMMGEVKLTKLAEFYDVYLKFRKNPKDDGLQKQLKDLQAVLRKEIVKPIGNGGKYKAGYDRLFGAKLFKDGKELGDLAKFVIAQEGESSPKLAHLAHFEKFSTYFTGFHANRKNMYSDEDKHTAITYRLIHENLPRFIDNLQILATIKQKHSALYDQIINELTASGLDVSLASHLDGYHKLLTQEGITAYNTLLGGISGEAGSRKIQGINELINSHHNQHCHKSERIAKLRPLHKQILSDGMGVSFLPSKFADDSEMCQAVNEFYRHYADVFAKVQSLFDGFDDHQKDGIYVEHKNLNELSKQAFGDFALLGRVLDGYYVDVVNPEFNERFAKAKTDNAKAKLTKEKDKFIKGVHSLASLEQAIEHYTARHDDESVQAGKLGQYFKHGLAGVDNPIQKIHNNHSTIKGFLERERPAGERALPKIKSGKNPEMTQLRQLKELLDNALNVAHFAKLLTTKTTLDNQDGNFYGEFGALYDELAKIPTLYNKVRDYLSQKPFSTEKYKLNFGNPTLLNGWDLNKEKDNFGIILQKDGCYYLALLDKAHKKVFDNAPNTGKNVYQKMIYKLLPGPNKMLPKVFFAKSNLDYYNPSAELLDKYAQGTHKKGNNFNLKDCHALIDFFKAGINKHPEWQHFGFKFSPTSSYQDLSDFYREVEPQGYQVKFVDINADYINELVEQGQLYLFQIYNKDFSPKAHGKPNLHTLYFKALFSKDNLANPIYKLNGEAQIFYRKASLDMNETTIHRAGEVLENKNPDNPKKRQFVYDIIKDKRYTQDKFMLHVPITMNFGVQGMTIKEFNKKVNQSIQQYDEVNVIGIDRGERHLLYLTVINSKGEILEQRSLNDITTASANGTQMTTPYHKILDKREIERLNARVGWGEIETIKELKSGYLSHVVHQISQLMLKYNAIVVLEDLNFGFKRGRFKVEKQIYQNFENALIKKLNHLVLKDEADDEIGSYKNALQLTNNFTDLKSIGKQTGFLFYVPAWNTSKIDPETGFVDLLKPRYENIAQSQAFFGKFDKICYNADKDYFEFHIDYAKFTDKAKNSRQIWKICSHGDKRYVYDKTANQNKGATKGINVNDELKSLFARHHINDKQPNLVMDICQNNDKEFHKSLIYLLKTLLALRYSNASSDEDFILSPVANDEGMFFNSALADDTQPQNADANGAYHIALKGLWVLEQIKNSDDLNKVKLAIDNQTWLNFAQNR

SEQ ID NO: 44 - protein, 1318 aa, Artificial Sequence
  Synthetic sequence
MLFQDFTHLYPLSKTMRFELKPIGKTLEHIHAKNFLSQDETMADMYQKVKAILDDYHRDFIADMMGEVKLTKLAEFYDVYLKFRKNPKDDGLQKQLKDLQAVLRKEIVKPIGNGGKYKAGYDRLFGAKLFKDGKELGDLAKFVIAQEGESSPKLAHLAHFEKFSTYFTGFHWNRKNMYSDEDKHTAITYRLIHENLPRFIDNLQILATIKQKHSALYDQIINELTASGLDVSLASHLDGYHKLLTQEGITAYNTLLGGISGEAGSRKIQGINELINSHHNQHCHKSERIAKLRPLHKQILSDGMGVSFLPSKFADDSEMCQAVNEFYRHYADVFAKVQSLFDGFDDHQKDGIYVEHKNLNELSKQAFGDFALLGRVLDGYYVDVVNPEFNERFAKAKTDNAKAKLTKEKDKFIKGVHSLASLEQAIEHYTARHDDESVQAGKLGQYFKHGLAGVDNPIQKIHNNHSTIKGFLERERPAGERALPKIKSGKNPEMTQLRQLKELLDNALNVAHFAKLLTTKTTLDNQDGNFYGEFGALYDELAKIPTLYNKVRDYLSQKPFSTEKYKLNFGNPTLLNGWDLNKEKDNFGIILQKDGCYYLALLDKAHKKVFDNAPNTGKNVYQKMIYKLLPGPNKMLPKVFFAKSNLDYYNPSAELLDKYAQGTHKKGNNFNLKDCHALIDFFKAGINKHPEWQHFGFKFSPTSSYQDLSDFYREVEPQGYQVKFVDINADYINELVEQGQLYLFQIYNKDFSPKAHGKPNLHTLYFKALFSKDNLANPIYKLNGEAQIFYRKASLDMNETTIHRAGEVLENKNPDNPKKRQFVYDIIKDKRYTQDKFMLHVPITMNFGVQGMTIKEFNKKVNQSIQQYDEVNVIGIDRGERHLLYLTVINSKGEILEQRSLNDITTASANGTQMTTPYHKILDKREIERLNARVGWGEIETIKELKSGYLSHVVHQISQLMLKYNAIVVLEDLNFGFKRGRFKVEKQIYQNFENALIKKLNHLVLKDEADDEIGSYKNALQLTNNFTDLKSIGKQTGFLFYVPAWNTSKIDPETGFVDLLKPRYENIAQSQAFFGKFDKICYNADKDYFEFHIDYAKFTDKAKNSRQIWKICSHGDKRYVYDKTANQNKGATKGINVNDELKSLFARHHINDKQPNLVMDICQNNDKEFHKSLIYLLKTLLALRYSNASSDEDFILSPVANDEGMFFNSALADDTQPQNADANGAYHIALKGLWVLEQIKNSDDLNKVKLAIDNQTWLNFAQNRKRPAATKKAGQAKKKKGSYPYDVPDYAYPYDVPDYAYPYDVPDYAGSPKKKRKV

SEQ ID NO: 45 - protein, 1264 aa, Artificial Sequence
  Synthetic sequence
MLFQDFTHLYPLSKTMRFELKPIGKTLEHIHAKNFLSQDETMADMYQKVKAILDDYHRDFIADMMGEVKLTKLAEFYDVYLKFRKNPKDDGLQKQLKDLQAVLRKEIVKPIGNGGKYKAGYDRLFGAKLFKDGKELGDLAKFVIAQEGESSPKLAHLAHFEKFSTYFTGFHRNRKRMYSDEDKHTAITYRLIHENLPRFIDNLQILATIKQKHSALYDQIINELTASGLDVSLASHLDGYHKLLTQEGITAYNTLLGGISGEAGSRKIQGINELINSHHNQHCHKSERIAKLRPLHKQILSDGMGVSFLPSKFADDSEMCQAVNEFYRHYADVFAKVQSLFDGFDDHQKDGIYVEHKNLNELSKQAFGDFALLGRVLDGYYVDVVNPEFNERFAKAKTDNAKAKLTKEKDKFIKGVHSLASLEQAIEHYTARHDDESVQAGKLGQYFKHGLAGVDNPIQKIHNNHSTIKGFLERERPAGERALPKIKSGKNPEMTQLRQLKELLDNALNVAHFAKLLTTKTTLDNQDGNFYGEFGALYDELAKIPTLYNKVRDYLSQKPFSTEKYKLNFGNPTLLNGWDLNKEKDNFGIILQKDGCYYLALLDKAHKKVFDNAPNTGKNVYQKMIYKLLPGPNKMLPKVFFAKSNLDYYNPSAELLDKYAQGTHKKGNNFNLKDCHALIDFFKAGINKHPEWQHFGFKFSPTSSYQDLSDFYREVEPQGYQVKFVDINADYINELVEQGQLYLFQIYNKDFSPKAHGKPNLHTLYFKALFSKDNLANPIYKLNGEAQIFYRKASLDMNETTIHRAGEVLENKNPDNPKKRQFVYDIIKDKRYTQDKFMLHVPITMNFGVQGMTIKEFNKKVNQSIQQYDEVNVIGIDRGERHLLYLTVINSKGEILEQRSLNDITTASANGTQMTTPYHKILDKREIERLNARVGWGEIETIKELKSGYLSHVVHQISQLMLKYNAIVVLEDLNFGFKRGRFKVEKQIYQNFENALIKKLNHLVLKDEADDEIGSYKNALQLTNNFTDLKSIGKQTGFLFYVPAWNTSKIDPETGFVDLLKPRYENIAQSQAFFGKFDKICYNADKDYFEFHIDYAKFTDKAKNSRQIWKICSHGDKRYVYDKTANQNKGATKGINVNDELKSLFARHHINDKQPNLVMDICQNNDKEFHKSLIYLLKTLLALRYSNASSDEDFILSPVANDEGMFFNSALADDTQPQNADANGAYHIALKGLWVLEQIKNSDDLNKVKLAIDNQTWLNFAQNR

SEQ ID NO: 46 - protein, 1264 aa, Artificial Sequence
  Synthetic sequence
MLFQDFTHLYPLSKTMRFELKPIGKTLEHIHAKNFLSQDETMADMYQKVKAILDDYHRDFIADMMGEVKLTKLAEFYDVYLKFRKNPKDDGLQKQLKDLQAVLRKEIVKPIGNGGKYKAGYDRLFGAKLFKDGKELGDLAKFVIAQEGESSPKLAHLAHFEKFSTYFTRFHRNRKNMYSDEDKHTAITYRLIHENLPRFIDNLQILATIKQKHSALYDQIINELTASGLDVSLASHLDGYHKLLTQEGITAYNTLLGGISGEAGSRKIQGINELINSHHNQHCHKSERIAKLRPLHKQILSDGMGVSFLPSKFADDSEMCQAVNEFYRHYADVFAKVQSLFDGFDDHQKDGIYVEHKNLNELSKQAFGDFALLGRVLDGYYVDVVNPEFNERFAKAKTDNAKAKLTKEKDKFIKGVHSLASLEQAIEHYTARHDDESVQAGKLGQYFKHGLAGVDNPIQKIHNNHSTIKGFLERERPAGERALPKIKSGKNPEMTQLRQLKELLDNALNVAHFAKLLTTKTTLDNQDGNFYGEFGALYDELAKIPTLYNKVRDYLSQKPFSTEKYKLNFGNPTLLNGWDLNKEKDNFGIILQKDGCYYLALLDKAHKKVFDNAPNTGKNVYQKMIYKLLPGPNKMLPKVFFAKSNLDYYNPSAELLDKYAQGTHKKGNNFNLKDCHALIDFFKAGINKHPEWQHFGFKFSPTSSYQDLSDFYREVEPQGYQVKFVDINADYINELVEQGQLYLFQIYNKDFSPKAHGKPNLHTLYFKALFSKDNLANPIYKLNGEAQIFYRKASLDMNETTIHRAGEVLENKNPDNPKKRQFVYDIIKDKRYTQDKFMLHVPITMNFGVQGMTIKEFNKKVNQSIQQYDEVNVIGIDRGERHLLYLTVINSKGEILEQRSLNDITTASANGTQMTTPYHKILDKREIERLNARVGWGEIETIKELKSGYLSHVVHQISQLMLKYNAIVVLEDLNFGFKRGRFKVEKQIYQNFENALIKKLNHLVLKDEADDEIGSYKNALQLTNNFTDLKSIGKQTGFLFYVPAWNTSKIDPETGFVDLLKPRYENIAQSQAFFGKFDKICYNADKDYFEFHIDYAKFTDKAKNSRQIWKICSHGDKRYVYDKTANQNKGATKGINVNDELKSLFARHHINDKQPNLVMDICQNNDKEFHKSLIYLLKTLLALRYSNASSDEDFILSPVANDEGMFFNSALADDTQPQNADANGAYHIALKGLWVLEQIKNSDDLNKVKLAIDNQTWLNFAQNR

SEQ ID NO: 47 - protein, 1264 aa, Artificial Sequence
  Synthetic sequence
MLFQDFTHLYPLSKTMRFELKPIGKTLEHIHAKNFLSQDETMADMYQKVKAILDDYHRDFIADMMGEVKLTKLAEFYDVYLKFRKNPKDDGLQKQLKDLQAVLRKEIVKPIGNGGKYKAGYDRLFGAKLFKDGKELGDLAKFVIAQEGESSPKLAHLAHFEKFSTYFTRFHKNRKNMYSDEDKHTAITYRLIHENLPRFIDNLQILATIKQKHSALYDQIINELTASGLDVSLASHLDGYHKLLTQEGITAYNTLLGGISGEAGSRKIQGINELINSHHNQHCHKSERIAKLRPLHKQILSDGMGVSFLPSKFADDSEMCQAVNEFYRHYADVFAKVQSLFDGFDDHQKDGIYVEHKNLNELSKQAFGDFALLGRVLDGYYVDVVNPEFNERFAKAKTDNAKAKLTKEKDKFIKGVHSLASLEQAIEHYTARHDDESVQAGKLGQYFKHGLAGVDNPIQKIHNNHSTIKGFLERERPAGERALPKIKSGKNPEMTQLRQLKELLDNALNVAHFAKLLTTKTTLDNQDGNFYGEFGALYDELAKIPTLYNKVRDYLSQKPFSTEKYKLNFGNPTLLNGWDLNKEKDNFGIILQKDGCYYLALLDKAHKKVFDNAPNTGKNVYQKMIYKLLPGPNKMLPKVFFAKSNLDYYNPSAELLDKYAQGTHKKGNNFNLKDCHALIDFFKAGINKHPEWQHFGFKFSPTSSYQDLSDFYREVEPQGYQVKFVDINADYINELVEQGQLYLFQIYNKDFSPKAHGKPNLHTLYFKALFSKDNLANPIYKLNGEAQIFYRKASLDMNETTIHRAGEVLENKNPDNPKKRQFVYDIIKDKRYTQDKFMLHVPITMNFGVQGMTIKEFNKKVNQSIQQYDEVNVIGIDRGERHLLYLTVINSKGEILEQRSLNDITTASANGTQMTTPYHKILDKREIERLNARVGWGEIETIKELKSGYLSHVVHQISQLMLKYNAIVVLEDLNFGFKRGRFKVEKQIYQNFENALIKKLNHLVLKDEADDEIGSYKNALQLTNNFTDLKSIGKQTGFLFYVPAWNTSKIDPETGFVDLLKPRYENIAQSQAFFGKFDKICYNADKDYFEFHIDYAKFTDKAKNSRQIWKICSHGDKRYVYDKTANQNKGATKGINVNDELKSLFARHHINDKQPNLVMDICQNNDKEFHKSLIYLLKTLLALRYSNASSDEDFILSPVANDEGMFFNSALADDTQPQNADANGAYHIALKGLWVLEQIKNSDDLNKVKLAIDNQTWLNFAQNR

SEQ ID NO: 48 - protein, 1264 aa, Artificial Sequence
  Synthetic sequence
MLFQDFTHLYPLSKTMRFELKPIGKTLEHIHAKNFLSQDETMADMYQKVKAILDDYHRDFIADMMGEVKLTKLAEFYDVYLKFRKNPKDDGLQKQLKDLQAVLRKEIVKPIGNGGKYKAGYDRLFGAKLFKDGKELGDLAKFVIAQEGESSPKLAHLAHFEKFSTYFTGFHDNRKNMYSDEDKHTAITYRLIHENLPRFIDNLQILATIKQKHSALYDQIINELTASGLDVSLASHLDGYHKLLTQEGITAYNTLLGGISGEAGSRKIQGINELINSHHNQHCHKSERIAKLRPLHKQILSDGMGVSFLPSKFADDSEMCQAVNEFYRHYADVFAKVQSLFDGFDDHQKDGIYVEHKNLNELSKQAFGDFALLGRVLDGYYVDVVNPEFNERFAKAKTDNAKAKLTKEKDKFIKGVHSLASLEQAIEHYTARHDDESVQAGKLGQYFKHGLAGVDNPIQKIHNNHSTIKGFLERERPAGERALPKIKSGKNPEMTQLRQLKELLDNALNVAHFAKLLTTKTTLDNQDGNFYGEFGALYDELAKIPTLYNKVRDYLSQKPFSTEKYKLNFGRPTLLNGWDLNKEKDNFGIILQKDGCYYLALLDKAHKKVFDNAPNTGKNVYQKMIYKLLPGPNKMLPKVFFAKSNLDYYNPSAELLDKYAQGTHKKGNNFNLKDCHALIDFFKAGINKHPEWQHFGFKFSPTSSYQDLSDFYREVEPQGYQVKFVDINADYINELVEQGQLYLFQIYNKDFSPKAHGKPNLHTLYFKALFSKDNLANPIYKLNGEAQIFYRKASLDMNETTIHRAGEVLENKNPDNPKKRQFVYDIIKDKRYTQDKFMLHVPITMNFGVQGMTIKEFNKKVNQSIQQYDEVNVIGIDRGERHLLYLTVINSKGEILEQRSLNDITTASANGTQMTTPYHKILDKREIERLNARVGWGEIETIKELKSGYLSHVVHQISQLMLKYNAIVVLEDLNFGFKRGRFKVEKQIYQNFENALIKKLNHLVLKDEADDEIGSYKNALQLTNNFTDLKSIGKQTGFLFYVPAWNTSKIDPETGFVDLLKPRYENIAQSQAFFGKFDKICYNADKDYFEFHIDYAKFTDKAKNSRQIWKICSHGDKRYVYDKTANQNKGATKGINVNDELKSLFARHHINDKQPNLVMDICQNNDKEFHKSLIYLLKTLLALRYSNASSDEDFILSPVANDEGMFFNSALADDTQPQNADANGAYHIALKGLWVLEQIKNSDDLNKVKLAIDNQTWLNFAQNR

SEQ ID NO: 49 - protein, 1264 aa, Artificial Sequence
  Synthetic sequence
MLFQDFTHLYPLSKTMRFELKPIGKTLEHIHAKNFLSQDETMADMYQKVKAILDDYHRDFIADMMGEVKLTKLAEFYDVYLKFRKNPKDDGLQKQLKDLQAVLRKEIVKPIGNGGKYKAGYDRLFGAKLFKDGKELGDLAKFVIAQEGESSPKLAHLAHFEKFSTYFTGFHDNRKNMYSDEDKHTAITYRLIHENLPRFIDNLQILATIKQKHSALYDQIINELTASGLDVSLASHLDGYHKLLTQEGITAYNTLLGGISGEAGSRKIQGINELINSHHNQHCHKSERIAKLRPLHKQILSDGMGVSFLPSKFADDSEMCQAVNEFYRHYADVFAKVQSLFDGFDDHQKDGIYVEHKNLNELSKQAFGDFALLGRVLDGYYVDVVNPEFNERFAKAKTDNAKAKLTKEKDKFIKGVHSLASLEQAIEHYTARHDDESVQAGKLGQYFKHGLAGVDNPIQKIHNNHSTIKGFLERERPAGERALPKIKSGKNPEMTQLRQLKELLDNALNVAHFAKLLTTKTTLDNQDGNFYGEFGALYDELAKIPTLYNKVRDYLSQKPFSTEKYKLNFGNPTLLNGWDLNKEKDNFGIILQKDGCYYLALLDKAHKKVFDNAPNTGKNVYQKMIYKLLPGPNKMLPKVFFAKSNLDYYNPSAELLDKYAQGTHKKGNNFNLKDCHALIDFFKAGINKHPEWQHFGFKFSPTSSYQDLSDFYREVEPQGYQVKFVDINADYINELVEQGQLYLFQIYNKDFSPKAHGKPNLHTLYFKALFSKDNLANPIYKLNGEAQIFYRKASLDMNETTIHRAGEVLENKNPDNPKKRQFVYDIIKDKRYTQDKFLLHVPITMNFGVQGMTIKEFNKKVNQSIQQYDEVNVIGIDRGERHLLYLTVINSKGEILEQRSLNDITTASANGTQMTTPYHKILDKREIERLNARVGWGEIETIKELKSGYLSHVVHQISQLMLKYNAIVVLEDLNFGFKRGRFKVEKQIYQNFENALIKKLNHLVLKDEADDEIGSYKNALQLTNNFTDLKSIGKQTGFLFYVPAWNTSKIDPETGFVDLLKPRYENIAQSQAFFGKFDKICYNADKDYFEFHIDYAKFTDKAKNSRQIWKICSHGDKRYVYDKTANQNKGATKGINVNDELKSLFARHHINDKQPNLVMDICQNNDKEFHKSLIYLLKTLLALRYSNASSDEDFILSPVANDEGMFFNSALADDTQPQNADANGAYHIALKGLWVLEQIKNSDDLNKVKLAIDNQTWLNFAQNR

SEQ ID NO: 50 - protein, 1264 aa, Artificial Sequence
  Synthetic sequence
MLFQDFTHLYPLSKTMRFELKPIGKTLEHIHAKNFLSQDETMADMYQKVKAILDDYHRDFIADMMGEVKLTKLAEFYDVYLKFRKNPKDDGLQKQLKDLQAVLRKEIVKPIGNGGKYKAGYDRLFGAKLFKDGKELGDLAKFVIAQEGESSPKLAHLAHFEKFSTYFTGFHDNRKNMYSDEDKHTAITYRLIHENLPRFIDNLQILATIKQKHSALYDQIINELTASGLDVSLASHLDGYHKLLTQEGITAYNTLLGGISGEAGSRKIQGINELINSHHNQHCHKSERIAKLRPLHKQILSDGMGVSFLPSKFADDSEMCQAVNEFYRHYADVFAKVQSLFDGFDDHQKDGIYVEHKNLNELSKQAFGDFALLGRVLDGYYVDVVNPEFNERFAKAKTDNAKAKLTKEKDKFIKGVHSLASLEQAIEHYTARHDDESVQAGKLGQYFKHGLAGVDNPIQKIHNNHSTIKGFLERERPAGERALPKIKSGKNPEMTQLRQLKELLDNALNVAHFAKLLTTKTTLDNQDGNFYGEFGALYDELAKIPTLYNKVRDYLSQKPFSTEKYKLNFGRPTLLNGWDLNKEKDNFGIILQKDGCYYLALLDKAHKKVFDNAPNTGKNVYQKMIYKLLPGPNKMLPKVFFAKSNLDYYNPSAELLDKYAQGTHKKGNNFNLKDCHALIDFFKAGINKHPEWQHFGFKFSPTSSYQDLSDFYREVEPQGYQVKFVDINADYINELVEQGQLYLFQIYNKDFSPKAHGKPNLHTLYFKALFSKDNLANPIYKLNGEAQIFYRKASLDMNETTIHRAGEVLENKNPDNPKKRQFVYDIIKDKRYTQDKFLLHVPITMNFGVQGMTIKEFNKKVNQSIQQYDEVNVIGIDRGERHLLYLTVINSKGEILEQRSLNDITTASANGTQMTTPYHKILDKREIERLNARVGWGEIETIKELKSGYLSHVVHQISQLMLKYNAIVVLEDLNFGFKRGRFKVEKQIYQNFENALIKKLNHLVLKDEADDEIGSYKNALQLTNNFTDLKSIGKQTGFLFYVPAWNTSKIDPETGFVDLLKPRYENIAQSQAFFGKFDKICYNADKDYFEFHIDYAKFTDKAKNSRQIWKICSHGDKRYVYDKTANQNKGATKGINVNDELKSLFARHHINDKQPNLVMDICQNNDKEFHKSLIYLLKTLLALRYSNASSDEDFILSPVANDEGMFFNSALADDTQPQNADANGAYHIALKGLWVLEQIKNSDDLNKVKLAIDNQTWLNFAQNR

SEQ ID NO: 51 - protein, 1264 aa, Artificial Sequence
  Synthetic sequence
MLFQDFTHLYPLSKTMRFELKPIGKTLEHIHAKNFLSQDETMADMYQKVKAILDDYHRDFIADMMGEVKLTKLAEFYDVYLKFRKNPKDDGLQKQLKDLQAVLRKEIVKPIGNGGKYKAGYDRLFGAKLFKDGKELGDLAKFVIAQEGESSPKLAHLAHFEKFSTYFTGFHRNRKNMYSDEDKHTAITYRLIHENLPRFIDNLQILATIKQKHSALYDQIINELTASGLDVSLASHLDGYHKLLTQEGITAYNTLLGGISGEAGSRKIQGINELINSHHNQHCHKSERIAKLRPLHKQILSDGMGVSFLPSKFADDSEMCQAVNEFYRHYADVFAKVQSLFDGFDDHQKDGIYVEHKNLNELSKQAFGDFALLGRVLDGYYVDVVNPEFNERFAKAKTDNAKAKLTKEKDKFIKGVHSLASLEQAIEHYTARHDDESVQAGKLGQYFKHGLAGVDNPIQKIHNNHSTIKGFLERERPAGERALPKIKSGKNPEMTQLRQLKELLDNALNVAHFAKLLTTKTTLDNQDGNFYGEFGALYDELAKIPTLYNKVRDYLSQKPFSTEKYKLNFGRPTLLNGWDLNKEKDNFGIILQKDGCYYLALLDKAHKKVFDNAPNTGKNVYQKMIYKLLPGPNKMLPKVFFAKSNLDYYNPSAELLDKYAQGTHKKGNNFNLKDCHALIDFFKAGINKHPEWQHFGFKFSPTSSYQDLSDFYREVEPQGYQVKFVDINADYINELVEQGQLYLFQIYNKDFSPKAHGKPNLHTLYFKALFSKDNLANPIYKLNGEAQIFYRKASLDMNETTIHRAGEVLENKNPDNPKKRQFVYDIIKDKRYTQDKFMLHVPITMNFGVQGMTIKEFNKKVNQSIQQYDEVNVIGIDRGERHLLYLTVINSKGEILEQRSLNDITTASANGTQMTTPYHKILDKREIERLNARVGWGEIETIKELKSGYLSHVVHQISQLMLKYNAIVVLEDLNFGFKRGRFKVEKQIYQNFENALIKKLNHLVLKDEADDEIGSYKNALQLTNNFTDLKSIGKQTGFLFYVPAWNTSKIDPETGFVDLLKPRYENIAQSQAFFGKFDKICYNADKDYFEFHIDYAKFTDKAKNSRQIWKICSHGDKRYVYDKTANQNKGATKGINVNDELKSLFARHHINDKQPNLVMDICQNNDKEFHKSLIYLLKTLLALRYSNASSDEDFILSPVANDEGMFFNSALADDTQPQNADANGAYHIALKGLWVLEQIKNSDDLNKVKLAIDNQTWLNFAQNR

SEQ ID NO: 52 - protein, 1264 aa, Artificial Sequence
  Synthetic sequence
MLFQDFTHLYPLSKTMRFELKPIGKTLEHIHAKNFLSQDETMADMYQKVKAILDDYHRDFIADMMGEVKLTKLAEFYDVYLKFRKNPKDDGLQKQLKDLQAVLRKEIVKPIGNGGKYKAGYDRLFGAKLFKDGKELGDLAKFVIAQEGESSPKLAHLAHFEKFSTYFTGFHRNRKNMYSDEDKHTAITYRLIHENLPRFIDNLQILATIKQKHSALYDQIINELTASGLDVSLASHLDGYHKLLTQEGITAYNTLLGGISGEAGSRKIQGINELINSHHNQHCHKSERIAKLRPLHKQILSDGMGVSFLPSKFADDSEMCQAVNEFYRHYADVFAKVQSLFDGFDDHQKDGIYVEHKNLNELSKQAFGDFALLGRVLDGYYVDVVNPEFNERFAKAKTDNAKAKLTKEKDKFIKGVHSLASLEQAIEHYTARHDDESVQAGKLGQYFKHGLAGVDNPIQKIHNNHSTIKGFLERERPAGERALPKIKSGKNPEMTQLRQLKELLDNALNVAHFAKLLTTKTTLDNQDGNFYGEFGALYDELAKIPTLYNKVRDYLSQKPFSTEKYKLNFGNPTLLNGWDLNKEKDNFGIILQKDGCYYLALLDKAHKKVFDNAPNTGKNVYQKMIYKLLPGPNKMLPKVFFAKSNLDYYNPSAELLDKYAQGTHKKGNNFNLKDCHALIDFFKAGINKHPEWQHFGFKFSPTSSYQDLSDFYREVEPQGYQVKFVDINADYINELVEQGQLYLFQIYNKDFSPKAHGKPNLHTLYFKALFSKDNLANPIYKLNGEAQIFYRKASLDMNETTIHRAGEVLENKNPDNPKKRQFVYDIIKDKRYTQDKFLLHVPITMNFGVQGMTIKEFNKKVNQSIQQYDEVNVIGIDRGERHLLYLTVINSKGEILEQRSLNDITTASANGTQMTTPYHKILDKREIERLNARVGWGEIETIKELKSGYLSHVVHQISQLMLKYNAIVVLEDLNFGFKRGRFKVEKQIYQNFENALIKKLNHLVLKDEADDEIGSYKNALQLTNNFTDLKSIGKQTGFLFYVPAWNTSKIDPETGFVDLLKPRYENIAQSQAFFGKFDKICYNADKDYFEFHIDYAKFTDKAKNSRQIWKICSHGDKRYVYDKTANQNKGATKGINVNDELKSLFARHHINDKQPNLVMDICQNNDKEFHKSLIYLLKTLLALRYSNASSDEDFILSPVANDEGMFFNSALADDTQPQNADANGAYHIALKGLWVLEQIKNSDDLNKVKLAIDNQTWLNFAQNR

SEQ ID NO: 53 - protein, 1264 aa, Artificial Sequence
  Synthetic sequence
MLFQDFTHLYPLSKTMRFELKPIGKTLEHIHAKNFLSQDETMADMYQKVKAILDDYHRDFIADMMGEVKLTKLAEFYDVYLKFRKNPKDDGLQKQLKDLQAVLRKEIVKPIGNGGKYKAGYDRLFGAKLFKDGKELGDLAKFVIAQEGESSPKLAHLAHFEKFSTYFTGFHRNRKNMYSDEDKHTAITYRLIHENLPRFIDNLQILATIKQKHSALYDQIINELTASGLDVSLASHLDGYHKLLTQEGITAYNTLLGGISGEAGSRKIQGINELINSHHNQHCHKSERIAKLRPLHKQILSDGMGVSFLPSKFADDSEMCQAVNEFYRHYADVFAKVQSLFDGFDDHQKDGIYVEHKNLNELSKQAFGDFALLGRVLDGYYVDVVNPEFNERFAKAKTDNAKAKLTKEKDKFIKGVHSLASLEQAIEHYTARHDDESVQAGKLGQYFKHGLAGVDNPIQKIHNNHSTIKGFLERERPAGERALPKIKSGKNPEMTQLRQLKELLDNALNVAHFAKLLTTKTTLDNQDGNFYGEFGALYDELAKIPTLYNKVRDYLSQKPFSTEKYKLNFGRPTLLNGWDLNKEKDNFGIILQKDGCYYLALLDKAHKKVFDNAPNTGKNVYQKMIYKLLPGPNKMLPKVFFAKSNLDYYNPSAELLDKYAQGTHKKGNNFNLKDCHALIDFFKAGINKHPEWQHFGFKFSPTSSYQDLSDFYREVEPQGYQVKFVDINADYINELVEQGQLYLFQIYNKDFSPKAHGKPNLHTLYFKALFSKDNLANPIYKLNGEAQIFYRKASLDMNETTIHRAGEVLENKNPDNPKKRQFVYDIIKDKRYTQDKFLLHVPITMNFGVQGMTIKEFNKKVNQSIQQYDEVNVIGIDRGERHLLYLTVINSKGEILEQRSLNDITTASANGTQMTTPYHKILDKREIERLNARVGWGEIETIKELKSGYLSHVVHQISQLMLKYNAIVVLEDLNFGFKRGRFKVEKQIYQNFENALIKKLNHLVLKDEADDEIGSYKNALQLTNNFTDLKSIGKQTGFLFYVPAWNTSKIDPETGFVDLLKPRYENIAQSQAFFGKFDKICYNADKDYFEFHIDYAKFTDKAKNSRQIWKICSHGDKRYVYDKTANQNKGATKGINVNDELKSLFARHHINDKQPNLVMDICQNNDKEFHKSLIYLLKTLLALRYSNASSDEDFILSPVANDEGMFFNSALADDTQPQNADANGAYHIALKGLWVLEQIKNSDDLNKVKLAIDNQTWLNFAQNR

SEQ ID NO: 54 - protein, 1264 aa, Artificial Sequence
  Synthetic sequence
MLFQDFTHLYPLSKTMRFELKPIGKTLEHIHAKNFLSQDETMADMYQKVKAILDDYHRDFIADMMGEVKLTKLAEFYDVYLKFRKNPKDDGLQKQLKDLQAVLRKEIVKPIGNGGKYKAGYDRLFGAKLFKDGKELGDLAKFVIAQEGESSPKLAHLAHFEKFSTYFTGFHRNRKNMYSDEDKHTAITYRLIHENLPRFIDNLQILATIKQKHSALYDQIINELTASGLDVSLASHLDGYHKLLTQEGITAYNTLLGGISGEAGSRKIQGINELINSHHNQHCHKSERIAKLRPLHKQILSDGMGVSFLPSKFADDSEMCQAVNEFYRHYADVFAKVQSLFDGFDDHQKDGIYVEHKNLNELSKQAFGDFALLGRVLDGYYVDVVNPEFNERFAKAKTDNAKAKLTKEKDKFIKGVHSLASLEQAIEHYTARHDDESVQAGKLGQYFKHGLAGVDNPIQKIHNNHSTIKGFLERERPAGERALPKIKSGKNPEMTQLRQLKELLDNALNVAHFAKLLTTKTTLDNQDGNFYGEFGALYDRLAKIPTLYNKVRDYLSQKPFSTEKYKLNFGNPTLLNGWDLNKEKDNFGIILQKDGCYYLALLDKAHKKVFDNAPNTGKNVYQKMIYKLLPGPNKMLPKVFFAKSNLDYYNPSAELLDKYAQGTHKKGNNFNLKDCHALIDFFKAGINKHPEWQHFGFKFSPTSSYQDLSDFYREVEPQGYQVKFVDINADYINELVEQGQLYLFQIYNKDFSPKAHGKPNLHTLYFKALFSKDNLANPIYKLNGEAQIFYRKASLDMNETTIHRAGEVLENKNPDNPKKRQFVYDIIKDKRYTQDKFMLHVPITMNFGVQGMTIKEFNKKVNQSIQQYDEVNVIGIDRGERHLLYLTVINSKGEILEQRSLNDITTASANGTQMTTPYHKILDKREIERLNARVGWGEIETIKELKSGYLSHVVHQISQLMLKYNAIVVLEDLNFGFKRGRFKVEKQIYQNFENALIKKLNHLVLKDEADDEIGSYKNALQLTNNFTDLKSIGKQTGFLFYVPAWNTSKIDPETGFVDLLKPRYENIAQSQAFFGKFDKICYNADKDYFEFHIDYAKFTDKAKNSRQIWKICSHGDKRYVYDKTANQNKGATKGINVNDELKSLFARHHINDKQPNLVMDICQNNDKEFHKSLIYLLKTLLALRYSNASSDEDFILSPVANDEGMFFNSALADDTQPQNADANGAYHIALKGLWVLEQIKNSDDLNKVKLAIDNQTWLNFAQNR

SEQ ID NO: 55 - protein, 1264 aa, Artificial Sequence
  Synthetic sequence
MLFQDFTHLYPLSKTMRFELKPIGKTLEHIHAKNFLSQDETMADMYQKVKAILDDYHRDFIADMMGEVKLTKLAEFYDVYLKFRKNPKDDGLQKQLKDLQAVLRKEIVKPIGNGGKYKAGYDRLFGAKLFKDGKELGDLAKFVIAQEGESSPKLAHLAHFEKFSTYFTGFHRNRKNMYSDEDKHTAITYRLIHENLPRFIDNLQILATIKQKHSALYDQIINELTASGLDVSLASHLDGYHKLLTQEGITAYNTLLGGISGEAGSRKIQGINELINSHHNQHCHKSERIAKLRPLHKQILSDGMGVSFLPSKFADDSEMCQAVNEFYRHYADVFAKVQSLFDGFDDHQKDGIYVEHKNLNELSKQAFGDFALLGRVLDGYYVDVVNPEFNERFAKAKTDNAKAKLTKEKDKFIKGVHSLASLEQAIEHYTARHDDESVQAGKLGQYFKHGLAGVDNPIQKIHNNHSTIKGFLERERPAGERALPKIKSGKNPEMTQLRQLKELLDNALNVAHFAKLLTTKTTLDNQDGNFYGEFGALYDELAKIPTLYNKVRDYLSQKPFSTEKYKLNFGNPTLLNGWDLNKEKDNFGIILQKDGCYYLALLDKAHKKVFDNAPNTGKNVYQKMIYKLLGGPNKMLPKVFFAKSNLDYYNPSAELLDKYAQGTHKKGNNFNLKDCHALIDFFKAGINKHPEWQHFGFKFSPTSSYQDLSDFYREVEPQGYQVKFVDINADYINELVEQGQLYLFQIYNKDFSPKAHGKPNLHTLYFKALFSKDNLANPIYKLNGEAQIFYRKASLDMNETTIHRAGEVLENKNPDNPKKRQFVYDIIKDKRYTQDKFMLHVPITMNFGVQGMTIKEFNKKVNQSIQQYDEVNVIGIDRGERHLLYLTVINSKGEILEQRSLNDITTASANGTQMTTPYHKILDKREIERLNARVGWGEIETIKELKSGYLSHVVHQISQLMLKYNAIVVLEDLNFGFKRGRFKVEKQIYQNFENALIKKLNHLVLKDEADDEIGSYKNALQLTNNFTDLKSIGKQTGFLFYVPAWNTSKIDPETGFVDLLKPRYENIAQSQAFFGKFDKICYNADKDYFEFHIDYAKFTDKAKNSRQIWKICSHGDKRYVYDKTANQNKGATKGINVNDELKSLFARHHINDKQPNLVMDICQNNDKEFHKSLIYLLKTLLALRYSNASSDEDFILSPVANDEGMFFNSALADDTQPQNADANGAYHIALKGLWVLEQIKNSDDLNKVKLAIDNQTWLNFAQNR

SEQ ID NO: 56 - protein, 1264 aa, Artificial Sequence
  Synthetic sequence
MLFQDFTHLYPLSKTMRFELKPIGKTLEHIHAKNFLSQDETMADMYQKVKAILDDYHRDFIADMMGEVKLTKLAEFYDVYLKFRKNPKDDGLQKQLKDLQAVLRKEIVKPIGNGGKYKAGYDRLFGAKLFKDGKELGDLAKFVIAQEGESSPKLAHLAHFEKFSTYFTGFHRNRKNMYSDEDKHTAITYRLIHENLPRFIDNLQILATIKQKHSALYDQIINELTASGLDVSLASHLDGYHKLLTQEGITAYNTLLGGISGEAGSRKIQGINELINSHHNQHCHKSERIAKLRPLHKQILSDGMGVSFLPSKFADDSEMCQAVNEFYRHYADVFAKVQSLFDGFDDHQKDGIYVEHKNLNELSKQAFGDFALLGRVLDGYYVDVVNPEFNERFAKAKTDNAKAKLTKEKDKFIKGVHSLASLEQAIEHYTARHDDESVQAGKLGQYFKHGLAGVDNPIQKIHNNHSTIKGFLERERPAGERALPKIKSGKNPEMTQLRQLKELLDNALNVAHFAKLLTTKTTLDNQDGNFYGEFGALYDELAKIPTLYNKVRDYLSQKPFSTEKYKLNFGNPTLLNGWDLNKEKDNFGIILQKDGCYYLALLDKAHKKVFDNAPNTGKNVYQKMIYKLLPGPNKMLPKVFFAKSNLDYYNESAELLDKYAQGTHKKGNNFNLKDCHALIDFFKAGINKHPEWQHFGFKFSPTSSYQDLSDFYREVEPQGYQVKFVDINADYINELVEQGQLYLFQIYNKDFSPKAHGKPNLHTLYFKALFSKDNLANPIYKLNGEAQIFYRKASLDMNETTIHRAGEVLENKNPDNPKKRQFVYDIIKDKRYTQDKFMLHVPITMNFGVQGMTIKEFNKKVNQSIQQYDEVNVIGIDRGERHLLYLTVINSKGEILEQRSLNDITTASANGTQMTTPYHKILDKREIERLNARVGWGEIETIKELKSGYLSHVVHQISQLMLKYNAIVVLEDLNFGFKRGRFKVEKQIYQNFENALIKKLNHLVLKDEADDEIGSYKNALQLTNNFTDLKSIGKQTGFLFYVPAWNTSKIDPETGFVDLLKPRYENIAQSQAFFGKFDKICYNADKDYFEFHIDYAKFTDKAKNSRQIWKICSHGDKRYVYDKTANQNKGATKGINVNDELKSLFARHHINDKQPNLVMDICQNNDKEFHKSLIYLLKTLLALRYSNASSDEDFILSPVANDEGMFFNSALADDTQPQNADANGAYHIALKGLWVLEQIKNSDDLNKVKLAIDNQTWLNFAQNR

SEQ ID NO: 57 - protein, 1264 aa, Artificial Sequence
  Synthetic sequence
MLFQDFTHLYPLSKTMRFELKPIGKTLEHIHAKNFLSQDETMADMYQKVKAILDDYHRDFIADMMGEVKLTKLAEFYDVYLKFRKNPKDDGLQKQLKDLQAVLRKEIVKPIGNGGKYKAGYDRLFGAKLFKDGKELGDLAKFVIAQEGESSPKLAHLAHFEKFSTYFTGFHRNRKNMYSDEDKHTAITYRLIHENLPRFIDNLQILATIKQKHSALYDQIINELTASGLDVSLASHLDGYHKLLTQEGITAYNTLLGGISGEAGSRKIQGINELINSHHNQHCHKSERIAKLRPLHKQILSDGMGVSFLPSKFADDSEMCQAVNEFYRHYADVFAKVQSLFDGFDDHQKDGIYVEHKNLNELSKQAFGDFALLGRVLDGYYVDVVNPEFNERFAKAKTDNAKAKLTKEKDKFIKGVHSLASLEQAIEHYTARHDDESVQAGKLGQYFKHGLAGVDNPIQKIHNNHSTIKGFLERERPAGERALPKIKSGKNPEMTQLRQLKELLDNALNVAHFAKLLTTKTTLDNQDGNFYGEFGALYKELAKIPTLYNKVRDYLSQKPFSTEKYKLNFGNPTLLNGWDLNKEKDNFGIILQKDGCYYLALLDKAHKKVFDNAPNTGKNVYQKMIYKLLPGPNKMLPKVFFAKSNLDYYNPSAELLDKYAQGTHKKGNNFNLKDCHALIDFFKAGINKHPEWQHFGFKFSPTSSYQDLSDFYREVEPQGYQVKFVDINADYINELVEQGQLYLFQIYNKDFSPKAHGKPNLHTLYFKALFSKDNLANPIYKLNGEAQIFYRKASLDMNETTIHRAGEVLENKNPDNPKKRQFVYDIIKDKRYTQDKFMLHVPITMNFGVQGMTIKEFNKKVNQSIQQYDEVNVIGIDRGERHLLYLTVINSKGEILEQRSLNDITTASANGTQMTTPYHKILDKREIERLNARVGWGEIETIKELKSGYLSHVVHQISQLMLKYNAIVVLEDLNFGFKRGRFKVEKQIYQNFENALIKKLNHLVLKDEADDEIGSYKNALQLTNNFTDLKSIGKQTGFLFYVPAWNTSKIDPETGFVDLLKPRYENIAQSQAFFGKFDKICYNADKDYFEFHIDYAKFTDKAKNSRQIWKICSHGDKRYVYDKTANQNKGATKGINVNDELKSLFARHHINDKQPNLVMDICQNNDKEFHKSLIYLLKTLLALRYSNASSDEDFILSPVANDEGMFFNSALADDTQPQNADANGAYHIALKGLWVLEQIKNSDDLNKVKLAIDNQTWLNFAQNR

SEQ ID NO: 58 - protein, 1264 aa, Artificial Sequence
  Synthetic sequence
MLFQDFTHLYPLSKTMRFELKPIGKTLEHIHAKNFLSQDETMADMYQKVKAILDDYHRDFIADMMGEVKLTKLAEFYDVYLKFRKNPKDDGLQKQLKDLQAVLRKEIVKPIGNGGKYKAGYDRLFGAKLFKDGKELGDLAKFVIAQEGESSPKLAHLAHFEKFSTYFTGFHRNRKNMYSDEDKHTAITYRLIHENLPRFIDNLQILATIKQKHSALYDQIINELTASGLDVSLASHLDGYHKLLTQEGITAYNTLLGGISGEAGSRKIQGINELINSHHNQHCHKSERIAKLRPLHKQILSDGMGVSFLPSKFADDSEMCQAVNEFYRHYADVFAKVQSLFDGFDDHQKDGIYVEHKNLNELSKQAFGDFALLGRVLDGYYVDVVNPEFNERFAKAKTDNAKAKLTKEKDKFIKGVHSLASLEQAIEHYTARHDDESVQAGKLGQYFKHGLAGVDNPIQKIHNNHSTIKGFLERERPAGERALPKIKSGKNPEMTQLRQLKELLDNALNVAHFAKLLTTKTTLDNQDGNFYGEFGALYDELAKIPTLYVKVRDYLSQKPFSTEKYKLNFGNPTLLNGWDLNKEKDNFGIILQKDGCYYLALLDKAHKKVFDNAPNTGKNVYQKMIYKLLPGPNKMLPKVFFAKSNLDYYNPSAELLDKYAQGTHKKGNNFNLKDCHALIDFFKAGINKHPEWQHFGFKFSPTSSYQDLSDFYREVEPQGYQVKFVDINADYINELVEQGQLYLFQIYNKDFSPKAHGKPNLHTLYFKALFSKDNLANPIYKLNGEAQIFYRKASLDMNETTIHRAGEVLENKNPDNPKKRQFVYDIIKDKRYTQDKFMLHVPITMNFGVQGMTIKEFNKKVNQSIQQYDEVNVIGIDRGERHLLYLTVINSKGEILEQRSLNDITTASANGTQMTTPYHKILDKREIERLNARVGWGEIETIKELKSGYLSHVVHQISQLMLKYNAIVVLEDLNFGFKRGRFKVEKQIYQNFENALIKKLNHLVLKDEADDEIGSYKNALQLTNNFTDLKSIGKQTGFLFYVPAWNTSKIDPETGFVDLLKPRYENIAQSQAFFGKFDKICYNADKDYFEFHIDYAKFTDKAKNSRQIWKICSHGDKRYVYDKTANQNKGATKGINVNDELKSLFARHHINDKQPNLVMDICQNNDKEFHKSLIYLLKTLLALRYSNASSDEDFILSPVANDEGMFFNSALADDTQPQNADANGAYHIALKGLWVLEQIKNSDDLNKVKLAIDNQTWLNFAQNR

SEQ ID NO: 59 - protein, 1264 aa, Artificial Sequence
  Synthetic sequence
MLFQDFTHLYPLSKTMRFELKPIGKTLEHIHAKNFLSQDETMADMYQKVKAILDDYHRDFIADMMGEVKLTKLAEFYDVYLKFRKNPKDDGLQKQLKDLQAVLRKEIVKPIGNGGKYKAGYDRLFGAKLFKDGKELGDLAKFVIAQEGESSPKLAHLAHFEKFSTYFTGFHRNRKNMYSDEDKHTAITYRLIHENLPRFIDNLQILATIKQKHSALYDQIINELTASGLDVSLASHLDGYHKLLTQEGITAYNTLLGGISGEAGSRKIQGINELINSHHNQHCHKSERIAKLRPLHKQILSDGMGVSFLPSKFADDSEMCQAVNEFYRHYADVFAKVQSLFDGFDDHQKDGIYVEHKNLNELSKQAFGDFALLGRVLDGYYVDVVNPEFNERFAKAKTDNAKAKLTKEKDKFIKGVHSLASLEQAIEHYTARHDDESVQAGKLGQYFKHGLAGVDNPIQKIHNNHSTIKGFLERERPAGERALPKIKSGKNPEMTQLRQLKELLDNALNVAHFAKLLTTKTTLDNQDGNFYGEFGALYDELAKIPTLYNKVRDYLSQKPFSTEKYKLNFGNPTLLNGWDLNKEKDNFGIILQKDGCYYLALLDKAHKKVFDNAPNTGKNVYQKMIYKLLPGPNKMLPKVFFAKSNLDYYNPSAELLDKYAQGTHKKGNNFNLKDCHALIDFFKAGINKHPEWQHFGFKFSPTSSYQDLSDFYREVEPQGYQVKFVDINADYINELVEQGQLYLFQIYNKDFSPKAHGKPNLHTLYFKALFSKDNLANPIYKLNGEAQIFYRKASLDMNETTIHRAGEVLENKNPDNPKKRQFVYDIIKDKRYTQDKFMLHVPITMNFGVQGMTIKEFNKKVNQSIQQYDEVNVIGIDRGESHLLYLTVINSKGEILEQRSLNDITTASANGTQMTTPYHKILDKREIERLNARVGWGEIETIKELKSGYLSHVVHQISQLMLKYNAIVVLEDLNFGFKRGRFKVEKQIYQNFENALIKKLNHLVLKDEADDEIGSYKNALQLTNNFTDLKSIGKQTGFLFYVPAWNTSKIDPETGFVDLLKPRYENIAQSQAFFGKFDKICYNADKDYFEFHIDYAKFTDKAKNSRQIWKICSHGDKRYVYDKTANQNKGATKGINVNDELKSLFARHHINDKQPNLVMDICQNNDKEFHKSLIYLLKTLLALRYSNASSDEDFILSPVANDEGMFFNSALADDTQPQNADANGAYHIALKGLWVLEQIKNSDDLNKVKLAIDNQTWLNFAQNR

SEQ ID NO: 60 - protein, 1264 aa, Artificial Sequence
  Synthetic sequence
MLFQDFTHLYPLSKTMRFELKPIGKTLEHIHAKNFLSQDETMADMYQKVKAILDDYHRDFIADMMGEVKLTKLAEFYDVYLKFRKNPKDDGLQKQLKDLQAVLRKEIVKPIGNGGKYKAGYDRLFGAKLFKDGKELGDLAKFVIAQEGESSPKLAHLAHFEKFSTYFTGFHRNRKNMYSDEDKHTAITYRLIHENLPRFIDNLQILATIKQKHSALYDQIINELTASGLDVSLASHLDGYHKLLTQEGITAYNTLLGGISGEAGSRKIQGINELINSHHNQHCHKSERIAKLRPLHKQILSDGMGVSFLPSKFADDSEMCQAVNEFYRHYADVFAKVQSLFDGFDDHQKDGIYVEHKNLNELSKQAFGDFALLGRVLDGYYVDVVNPEFNERFAKAKTDNAKAKLTKEKDKFIKGVHSLASLEQAIEHYTARHDDESVQAGKLGQYFKHGLAGVDNPIQKIHNNHSTIKGFLERERPAGERALPKIKSGKNPEMTQLRQLKELLDNALNVAHFAKLLTTKTTLDNQDGNFYGEFGALYDELAKIPTLYNKVRDYLSQKPFSTEKYKLTFGNPTLLNGWDLNKEKDNFGIILQKDGCYYLALLDKAHKKVFDNAPNTGKNVYQKMIYKLLPGPNKMLPKVFFAKSNLDYYNPSAELLDKYAQGTHKKGNNFNLKDCHALIDFFKAGINKHPEWQHFGFKFSPTSSYQDLSDFYREVEPQGYQVKFVDINADYINELVEQGQLYLFQIYNKDFSPKAHGKPNLHTLYFKALFSKDNLANPIYKLNGEAQIFYRKASLDMNETTIHRAGEVLENKNPDNPKKRQFVYDIIKDKRYTQDKFMLHVPITMNFGVQGMTIKEFNKKVNQSIQQYDEVNVIGIDRGERHLLYLTVINSKGEILEQRSLNDITTASANGTQMTTPYHKILDKREIERLNARVGWGEIETIKELKSGYLSHVVHQISQLMLKYNAIVVLEDLNFGFKRGRFKVEKQIYQNFENALIKKLNHLVLKDEADDEIGSYKNALQLTNNFTDLKSIGKQTGFLFYVPAWNTSKIDPETGFVDLLKPRYENIAQSQAFFGKFDKICYNADKDYFEFHIDYAKFTDKAKNSRQIWKICSHGDKRYVYDKTANQNKGATKGINVNDELKSLFARHHINDKQPNLVMDICQNNDKEFHKSLIYLLKTLLALRYSNASSDEDFILSPVANDEGMFFNSALADDTQPQNADANGAYHIALKGLWVLEQIKNSDDLNKVKLAIDNQTWLNFAQNR

SEQ ID NO: 61 - protein, 1264 aa, Artificial Sequence
  Synthetic sequence
MLFQDFTHLYPLSKTMRFELKPIGKTLEHIHAKNFLSQDETMADMYQKVKAILDDYHRDFIADMMGEVKLTKLAEFYDVYLKFRKNPKDDGLQKQLKDLQAVLRKEIVKPIGNGGKYKAGYDRLFGAKLFKDGKELGDLAKFVIAQEGESSPKLAHLAHFEKFSTYFTGFHRNRKNMYSDEDKHTAITYRLIHENLPRFIDNLQILATIKQKHSALYDQIINELTASGLDVSLASHLDGYHKLLTQEGITAYNTLLGGISGEAGSRKIQGINELINSHHNQHCHKSERIAKLRPLHKQILSDGMGVSFLPSKFADDSEMCQAVNEFYRHYADVFAKVQSLFDGFDDHQKDGIYVEHKNLNELSKQAFGDFALLGRVLDGYYVDVVNPEFNERFAKAKTDNAKAKLTKEKDKFIKGVHSLASLEQAIEHYTARHDDESVQAGKLGQYFKHGLAGVDNPIQKIHNNHSTIKGFLERERPAGERALPKIKSGKNPEMTQLRQLKELLDNALNVAHFAKLLTTKTTLDNQDGNFYGEFGALYDELAKIPTLYNKVRDYLSQKPFSTEKYKLNFGNPTLLKGWDLNKEKDNFGIILQKDGCYYLALLDKAHKKVFDNAPNTGKNVYQKMIYKLLPGPNKMLPKVFFAKSNLDYYNPSAELLDKYAQGTHKKGNNFNLKDCHALIDFFKAGINKHPEWQHFGFKFSPTSSYQDLSDFYREVEPQGYQVKFVDINADYINELVEQGQLYLFQIYNKDFSPKAHGKPNLHTLYFKALFSKDNLANPIYKLNGEAQIFYRKASLDMNETTIHRAGEVLENKNPDNPKKRQFVYDIIKDKRYTQDKFMLHVPITMNFGVQGMTIKEFNKKVNQSIQQYDEVNVIGIDRGERHLLYLTVINSKGEILEQRSLNDITTASANGTQMTTPYHKILDKREIERLNARVGWGEIETIKELKSGYLSHVVHQISQLMLKYNAIVVLEDLNFGFKRGRFKVEKQIYQNFENALIKKLNHLVLKDEADDEIGSYKNALQLTNNFTDLKSIGKQTGFLFYVPAWNTSKIDPETGFVDLLKPRYENIAQSQAFFGKFDKICYNADKDYFEFHIDYAKFTDKAKNSRQIWKICSHGDKRYVYDKTANQNKGATKGINVNDELKSLFARHHINDKQPNLVMDICQNNDKEFHKSLIYLLKTLLALRYSNASSDEDFILSPVANDEGMFFNSALADDTQPQNADANGAYHIALKGLWVLEQIKNSDDLNKVKLAIDNQTWLNFAQNR

SEQ ID NO: 62 - protein, 1264 aa, Artificial Sequence
  Synthetic sequence
MLFQDFTHLYPLSKTMRFELKPIGKTLEHIHAKNFLSQDETMADMYQKVKAILDDYHRDFIADMMGEVKLTKLAEFYDVYLKFRKNPKDDGLQKQLKDLQAVLRKEIVKPIGNGGKYKAGYDRLFGAKLFKDGKELGDLAKFVIAQEGESSPKLAHLAHFEKFSTYFTGFHRNRKNMYSDEDKHTAITYRLIHENLPRFIDNLQILATIKQKHSALYDQIINELTASGLDVSLASHLDGYHKLLTQEGITAYNTLLGGISGEAGSRKIQGINELINSHHNQHCHKSERIAKLRPLHKQILSDGMGVSFLPSKFADDSEMCQAVNEFYRHYADVFAKVQSLFDGFDDHQKDGIYVEHKNLNELSKQAFGDFALLGRVLDGYYVDVVNPEFNERFAKAKTDNAKAKLTKEKDKFIKGVHSLASLEQAIEHYTARHDDESVQAGKLGQYFKHGLAGVDNPIQKIHNNHSTIKGFLERERPAGERALPKIKSGKNPEMTQLRQLKELLDNALNVAHFAKLLTTKTTLDNQDGNFYGEFGALYDELAKIPTLYNKVRDYLLQKPFSTEKYKLNFGNPTLLNGWDLNKEKDNFGIILQKDGCYYLALLDKAHKKVFDNAPNTGKNVYQKMIYKLLPGPNKMLPKVFFAKSNLDYYNPSAELLDKYAQGTHKKGNNFNLKDCHALIDFFKAGINKHPEWQHFGFKFSPTSSYQDLSDFYREVEPQGYQVKFVDINADYINELVEQGQLYLFQIYNKDFSPKAHGKPNLHTLYFKALFSKDNLANPIYKLNGEAQIFYRKASLDMNETTIHRAGEVLENKNPDNPKKRQFVYDIIKDKRYTQDKFMLHVPITMNFGVQGMTIKEFNKKVNQSIQQYDEVNVIGIDRGERHLLYLTVINSKGEILEQRSLNDITTASANGTQMTTPYHKILDKREIERLNARVGWGEIETIKELKSGYLSHVVHQISQLMLKYNAIVVLEDLNFGFKRGRFKVEKQIYQNFENALIKKLNHLVLKDEADDEIGSYKNALQLTNNFTDLKSIGKQTGFLFYVPAWNTSKIDPETGFVDLLKPRYENIAQSQAFFGKFDKICYNADKDYFEFHIDYAKFTDKAKNSRQIWKICSHGDKRYVYDKTANQNKGATKGINVNDELKSLFARHHINDKQPNLVMDICQNNDKEFHKSLIYLLKTLLALRYSNASSDEDFILSPVANDEGMFFNSALADDTQPQNADANGAYHIALKGLWVLEQIKNSDDLNKVKLAIDNQTWLNFAQNR

SEQ ID NO: 63 - protein, 1264 aa, Artificial Sequence
  Synthetic sequence
MLFQDFTHLYPLSKTMRFELKPIGKTLEHIHAKNFLSQDETMADMYQKVKAILDDYHRDFIADMMGEVKLTKLAEFYDVYLKFRKNPKDDGLQKQLKDLQAVLRKEIVKPIGNGGKYKAGYDRLFGAKLFKDGKELGDLAKFVIAQEGESSPKLAHLAHFEKFSTYFTGFHRNRKNMYSDEDKHTAITYRLIHENLPRFIDNLQILATIKQKHSALYDQIINELTASGLDVSLASHLDGYHKLLTQEGITAYNTLLGGISGEAGSRKIQGINELINSHHNQHCHKSERIAKLRPLHKQILSDGMGVSFLPSKFADDSEMCQAVNEFYRHYADVFAKVQSLFDGFDDHQKDGIYVEHKNLNELSKQAFGDFALLGRVLDGYYVDVVNPEFNERFAKAKTDNAKAKLTKEKDKFIKGVHSLASLEQAIEHYTARHDDESVQAGKLGQYFKHGLAGVDNPIQKIHNNHSTIKGFLERERPAGERALPKIKSGKNPEMTQLRQLKELLDNALNVAHFAKLLTTKTTLDNQDGNFYGEFGALYDELAKIPTLYNKVRDYLSQKPFSTEKYKLNFGNPTLLNGWDLNKEKDNFGIILQKDGCYYLALLDKAHKKVFDNAPNTGKNVYQKMIYKLLPGPNKMLPKVFFAKSNLDYYNPSAELLDKYAQGTHKKGNNFNLKDCHALIDFFKAGINKHPEWQHFGFKFSPTSSYQDLSDFYREVEPQGYQVKFVDINADYINELVEQGQLYLFQIYNKDFSPKAHGKPNLHTLYFKALFSKDNLANPIYKLNGEAQIFYRKASLDMNETTIHRAGEVLENKNPDNPKKRQFVYDIIKDKRYTQDKFMLHVPITMNFGVQGMTIKEFNKKVNQSIQQYDEVNVIAIDRGERHLLYLTVINSKGEILEQRSLNDITTASANGTQMTTPYHKILDKREIERLNARVGWGEIETIKELKSGYLSHVVHQISQLMLKYNAIVVLEDLNFGFKRGRFKVEKQIYQNFENALIKKLNHLVLKDEADDEIGSYKNALQLTNNFTDLKSIGKQTGFLFYVPAWNTSKIDPETGFVDLLKPRYENIAQSQAFFGKFDKICYNADKDYFEFHIDYAKFTDKAKNSRQIWKICSHGDKRYVYDKTANQNKGATKGINVNDELKSLFARHHINDKQPNLVMDICQNNDKEFHKSLIYLLKTLLALRYSNASSDEDFILSPVANDEGMFFNSALADDTQPQNADANGAYHIALKGLWVLEQIKNSDDLNKVKLAIDNQTWLNFAQNR

SEQ ID NO: 64 - protein, 1264 aa, Artificial Sequence
  Synthetic sequence
MLFQDFTHLYPLSKTMRFELKPIGKTLEHIHAKNFLSQDETMADMYQKVKAILDDYHRDFIADMMGEVKLTKLAEFYDVYLKFRKNPKDDGLQKQLKDLQAVLRKEIVKPIGNGGKYKAGYDRLFGAKLFKDGKELGDLAKFVIAQEGESSPKLAHLAHFEKFSTYFTGFHRNRKNMYSDEDKHTAITYRLIHENLPRFIDNLQILATIKQKHSALYDQIINELTASGLDVSLASHLDGYHKLLTQEGITAYNTLLGGISGEAGSRKIQGINELINSHHNQHCHKSERIAKLRPLHKQILSDGMGVSFLPSKFADDSEMCQAVNEFYRHYADVFAKVQSLFDGFDDHQKDGIYVEHKNLNELSKQAFGDFALLGRVLDGYYVDVVNPEFNERFAKAKTDNAKAKLTKEKDKFIKGVHSLASLEQAIEHYTARHDDESVQAGKLGQYFKHGLAGVDNPIQKIHNNHSTIKGFLERERPAGERALPKIKSGKNPEMTQLRQLKELLDNALNVAHFAKLLTTKTTLDNQDGNFYGEFGALYDELAKIPTLYNKVRDYLSQKPFSTEKYKLNFGNPTLLNGWDLNKEKDNFGIILQKDGCYYLALLDKAHKKVFDNAPNTGKNVYQKMIYKLLPGPNKMLPKVFFAKSNLDYYNPSAELLDKYAQGTHKKGNNFNLKDCHALIDFFKAGINKHPEWQHFGFKFSPTSSYQDLSDFYREVEPQGYQVKFVDINADYINELVEQGQLYLFQIYNKDFSPKAHGKPNLHTLYFKALFSKDNLANPIYKLNGEAQIFYRKASLDMNETTIHRAGEVLENKNPDNPKKRQFVYDIIKDKRYTQDKFMLHVPITMNFGVQGMTIKEFNKKVNQSIQQYDEVNVIGADRGERHLLYLTVINSKGEILEQRSLNDITTASANGTQMTTPYHKILDKREIERLNARVGWGEIETIKELKSGYLSHVVHQISQLMLKYNAIVVLEDLNFGFKRGRFKVEKQIYQNFENALIKKLNHLVLKDEADDEIGSYKNALQLTNNFTDLKSIGKQTGFLFYVPAWNTSKIDPETGFVDLLKPRYENIAQSQAFFGKFDKICYNADKDYFEFHIDYAKFTDKAKNSRQIWKICSHGDKRYVYDKTANQNKGATKGINVNDELKSLFARHHINDKQPNLVMDICQNNDKEFHKSLIYLLKTLLALRYSNASSDEDFILSPVANDEGMFFNSALADDTQPQNADANGAYHIALKGLWVLEQIKNSDDLNKVKLAIDNQTWLNFAQNR

SEQ ID NO: 65 - protein, 1264 aa, Artificial Sequence
  Synthetic sequence
MLFQDFTHLYPLSKTMRFELKPIGKTLEHIHAKNFLSQDETMADMYQKVKAILDDYHRDFIADMMGEVKLTKLAEFYDVYLKFRKNPKDDGLQKQLKDLQAVLRKEIVKPIGNGGKYKAGYDRLFGAKLFKDGKELGDLAKFVIAQEGESSPKLAHLAHFEKFSTYFTGFHRNRKNMYSDEDKHTAITYRLIHENLPRFIDNLQILATIKQKHSALYDQIINELTASGLDVSLASHLDGYHKLLTQEGITAYNTLLGGISGEAGSRKIQGINELINSHHNQHCHKSERIAKLRPLHKQILSDGMGVSFLPSKFADDSEMCQAVNEFYRHYADVFAKVQSLFDGFDDHQKDGIYVEHKNLNELSKQAFGDFALLGRVLDGYYVDVVNPEFNERFAKAKTDNAKAKLTKEKDKFIKGVHSLASLEQAIEHYTARHDDESVQAGKLGQYFKHGLAGVDNPIQKIHNNHSTIKGFLERERPAGERALPKIKSGKNPEMTQLRQLKELLDNALNVAHFAKLLTTKTTLDNQDGNFYGEFGALYDELAKIPTLYRKVRDYLSQKPFSTEKYKLNFGNPTLLNGWDLNKEKDNFGIILQKDGCYYLALLDKAHKKVFDNAPNTGKNVYQKMIYKLLPGPNKMLPKVFFAKSNLDYYNPSAELLDKYAQGTHKKGNNFNLKDCHALIDFFKAGINKHPEWQHFGFKFSPTSSYQDLSDFYREVEPQGYQVKFVDINADYINELVEQGQLYLFQIYNKDFSPKAHGKPNLHTLYFKALFSKDNLANPIYKLNGEAQIFYRKASLDMNETTIHRAGEVLENKNPDNPKKRQFVYDIIKDKRYTQDKFMLHVPITMNFGVQGMTIKEFNKKVNQSIQQYDEVNVIGIDRGERHLLYLTVINSKGEILEQRSLNDITTASANGTQMTTPYHKILDKREIERLNARVGWGEIETIKELKSGYLSHVVHQISQLMLKYNAIVVLEDLNFGFKRGRFKVEKQIYQNFENALIKKLNHLVLKDEADDEIGSYKNALQLTNNFTDLKSIGKQTGFLFYVPAWNTSKIDPETGFVDLLKPRYENIAQSQAFFGKFDKICYNADKDYFEFHIDYAKFTDKAKNSRQIWKICSHGDKRYVYDKTANQNKGATKGINVNDELKSLFARHHINDKQPNLVMDICQNNDKEFHKSLIYLLKTLLALRYSNASSDEDFILSPVANDEGMFFNSALADDTQPQNADANGAYHIALKGLWVLEQIKNSDDLNKVKLAIDNQTWLNFAQNR

SEQ ID NO: 66 - protein, 1264 aa, Artificial Sequence
  Synthetic sequence
MLFQDFTHLYPLSKTMRFELKPIGKTLEHIHAKNFLSQDETMADMYQKVKAILDDYHRDFIADMMGEVKLTKLAEFYDVYLKFRKNPKDDGLQKQLKDLQAVLRKEIVKPIGNGGKYKAGYDRLFGAKLFKDGKELGDLAKFVIAQEGESSPKLAHLAHFEKFSTYFTGFHRNRKNMYSDEDKHTAITYRLIHENLPRFIDNLQILATIKQKHSALYDQIINELTASGLDVSLASHLDGYHKLLTQEGITAYNTLLGGISGEAGSRKIQGINELINSHHNQHCHKSERIAKLRPLHKQILSDGMGVSFLPSKFADDSEMCQAVNEFYRHYADVFAKVQSLFDGFDDHQKDGIYVEHKNLNELSKQAFGDFALLGRVLDGYYVDVVNPEFNERFAKAKTDNAKAKLTKEKDKFIKGVHSLASLEQAIEHYTARHDDESVQAGKLGQYFKHGLAGVDNPIQKIHNNHSTIKGFLERERPAGERALPKIKSGKNPEMTQLRQLKELLDNALNVAHFAKLLTTKTTLDNQDGNFYGEFGALYDELAKIPTLYNKVKDYLSQKPFSTEKYKLNFGNPTLLNGWDLNKEKDNFGIILQKDGCYYLALLDKAHKKVFDNAPNTGKNVYQKMIYKLLPGPNKMLPKVFFAKSNLDYYNPSAELLDKYAQGTHKKGNNFNLKDCHALIDFFKAGINKHPEWQHFGFKFSPTSSYQDLSDFYREVEPQGYQVKFVDINADYINELVEQGQLYLFQIYNKDFSPKAHGKPNLHTLYFKALFSKDNLANPIYKLNGEAQIFYRKASLDMNETTIHRAGEVLENKNPDNPKKRQFVYDIIKDKRYTQDKFMLHVPITMNFGVQGMTIKEFNKKVNQSIQQYDEVNVIGIDRGERHLLYLTVINSKGEILEQRSLNDITTASANGTQMTTPYHKILDKREIERLNARVGWGEIETIKELKSGYLSHVVHQISQLMLKYNAIVVLEDLNFGFKRGRFKVEKQIYQNFENALIKKLNHLVLKDEADDEIGSYKNALQLTNNFTDLKSIGKQTGFLFYVPAWNTSKIDPETGFVDLLKPRYENIAQSQAFFGKFDKICYNADKDYFEFHIDYAKFTDKAKNSRQIWKICSHGDKRYVYDKTANQNKGATKGINVNDELKSLFARHHINDKQPNLVMDICQNNDKEFHKSLIYLLKTLLALRYSNASSDEDFILSPVANDEGMFFNSALADDTQPQNADANGAYHIALKGLWVLEQIKNSDDLNKVKLAIDNQTWLNFAQNR

SEQ ID NO: 67 - protein, 1264 aa, Artificial Sequence
  Synthetic sequence
MLFQDFTHLYPLSKTMRFELKPIGKTLEHIHAKNFLSQDETMADMYQKVKAILDDYHRDFIADMMGEVKLTKLAEFYDVYLKFRKNPKDDGLQKQLKDLQAVLRKEIVKPIGNGGKYKAGYDRLFGAKLFKDGKELGDLAKFVIAQEGESSPKLAHLAHFEKFSTYFTGFHRNRKNMYSDEDKHTAITYRLIHENLPRFIDNLQILATIKQKHSALYDQIINELTASGLDVSLASHLDGYHKLLTQEGITAYNTLLGGISGEAGSRKIQGINELINSHHNQHCHKSERIAKLRPLHKQILSDGMGVSFLPSKFADDSEMCQAVNEFYRHYADVFAKVQSLFDGFDDHQKDGIYVEHKNLNELSKQAFGDFALLGRVLDGYYVDVVNPEFNERFAKAKTDNAKAKLTKEKDKFIKGVHSLASLEQAIEHYTARHDDESVQAGKLGQYFKHGLAGVDNPIQKIHNNHSTIKGFLERERPAGERALPKIKSGKNPEMTQLRQLKELLDNALNVAHFAKLLTTKTTLDNQDGNFYGEFGALYDELAKIPTLYNKVRDYLSQKPFSTEKYKLMFGNPTLLNGWDLNKEKDNFGIILQKDGCYYLALLDKAHKKVFDNAPNTGKNVYQKMIYKLLPGPNKMLPKVFFAKSNLDYYNPSAELLDKYAQGTHKKGNNFNLKDCHALIDFFKAGINKHPEWQHFGFKFSPTSSYQDLSDFYREVEPQGYQVKFVDINADYINELVEQGQLYLFQIYNKDFSPKAHGKPNLHTLYFKALFSKDNLANPIYKLNGEAQIFYRKASLDMNETTIHRAGEVLENKNPDNPKKRQFVYDIIKDKRYTQDKFMLHVPITMNFGVQGMTIKEFNKKVNQSIQQYDEVNVIGIDRGERHLLYLTVINSKGEILEQRSLNDITTASANGTQMTTPYHKILDKREIERLNARVGWGEIETIKELKSGYLSHVVHQISQLMLKYNAIVVLEDLNFGFKRGRFKVEKQIYQNFENALIKKLNHLVLKDEADDEIGSYKNALQLTNNFTDLKSIGKQTGFLFYVPAWNTSKIDPETGFVDLLKPRYENIAQSQAFFGKFDKICYNADKDYFEFHIDYAKFTDKAKNSRQIWKICSHGDKRYVYDKTANQNKGATKGINVNDELKSLFARHHINDKQPNLVMDICQNNDKEFHKSLIYLLKTLLALRYSNASSDEDFILSPVANDEGMFFNSALADDTQPQNADANGAYHIALKGLWVLEQIKNSDDLNKVKLAIDNQTWLNFAQNR

SEQ ID NO: 68 - protein, 1264 aa, Artificial Sequence
  Synthetic sequence
MLFQDFTHLYPLSKTMRFELKPIGKTLEHIHAKNFLSQDETMADMYQKVKAILDDYHRDFIADMMGEVKLTKLAEFYDVYLKFRKNPKDDGLQKQLKDLQAVLRKEIVKPIGNGGKYKAGYDRLFGAKLFKDGKELGDLAKFVIAQEGESSPKLAHLAHFEKFSTYFTGFHRNRKNMYSDEDKHTAITYRLIHENLPRFIDNLQILATIKQKHSALYDQIINELTASGLDVSLASHLDGYHKLLTQEGITAYNTLLGGISGEAGSRKIQGINELINSHHNQHCHKSERIAKLRPLHKQILSDGMGVSFLPSKFADDSEMCQAVNEFYRHYADVFAKVQSLFDGFDDHQKDGIYVEHKNLNELSKQAFGDFALLGRVLDGYYVDVVNPEFNERFAKAKTDNAKAKLTKEKDKFIKGVHSLASLEQAIEHYTARHDDESVQAGKLGQYFKHGLAGVDNPIQKIHNNHSTIKGFLERERPAGERALPKIKSGKNPEMTQLRQLKELLDNALNVAHFAKLLTTKTTLDNQDGNFYGEFGALYDELAKIPTLYNKVRDYLSQKPFSTEKYKLNFGNPTLLNGWDLNKEKDNFGIILQKDGCYYLALLDKAHKKVFDNAPNTGKNVYQKMIYKLLPGPNKMLPKVFFAKSNLDYYNPSAELLDKYAQGTHKKGNNFNLKDCHALIDFFKAGINKHPEWQHFGFKFSPTSSYQDLSDFYREVEPQGYQVKFVDINADYINELVEQGQLYLFQIYNKDFSPKAHGKPNLHTLYFKALFSKDNLANPIYKLNGEAQIFYRKASLDMNETTIHRAGEVLENKNPDNPKKRQFVYDIIKDKRYTQDKFMLHVPITMNFGVQGMTIKEFNKKVNQSIQQYDEVNVIGIARGERHLLYLTVINSKGEILEQRSLNDITTASANGTQMTTPYHKILDKREIERLNARVGWGEIETIKELKSGYLSHVVHQISQLMLKYNAIVVLADLNFGFKRGRFKVEKQIYQNFENALIKKLNHLVLKDEADDEIGSYKNALQLTNNFTDLKSIGKQTGFLFYVPAWNTSKIDPETGFVDLLKPRYENIAQSQAFFGKFDKICYNADKDYFEFHIDYAKFTDKAKNSRQIWKICSHGDKRYVYDKTANQNKGATKGINVNDELKSLFARHHINDKQPNLVMDICQNNDKEFHKSLIYLLKTLLALRYSNASSDEDFILSPVANDEGMFFNSALADDTQPQNADANGAYHIALKGLWVLEQIKNSDDLNKVKLAIDNQTWLNFAQNR

SEQ ID NO: 69 - protein, 16 aa, Artificial Sequence
  Synthetic sequence
KRPAATKKAGQAKKKK

SEQ ID NO: 70 - protein, 2 aa, Artificial Sequence
  Synthetic sequence
SA

SEQ ID NO: 71 - protein, 2 aa, Artificial Sequence
  Synthetic sequence
GS

SEQ ID NO: 72 - protein, 3 aa, Artificial Sequence
  Synthetic sequence
GSG

SEQ ID NO: 73 - protein, 8 aa, Artificial Sequence
  Synthetic sequence
GSSGGSSG

SEQ ID NO: 74 - protein, 10 aa, Artificial Sequence
  Synthetic sequence
HHHHHHHHHH

SEQ ID NO: 75 - protein, 27 aa, Artificial Sequence
  Synthetic sequence
YPYDVPDYAYPYDVPDYAYPYDVPDYA

SEQ ID NO: 76 - protein, 11 aa, Artificial Sequence
  Synthetic sequence
VSGWRLFKKIS

SEQ ID NO: 77 - protein, 1285 aa, Artificial Sequence
  Synthetic sequence
MAPKKKRKVMLFQDFTHLYPLSKTMRFELKPIGKTLEHIHAKNFLSQDETMADMYQKVKAILDDYHRDFIADMMGEVKLTKLAEFYDVYLKFRKNPKDDGLQKQLKDLQAVLRKEIVKPIGNGGKYKAGYDRLFGAKLFKDGKELGDLAKFVIAQEGESSPKLAHLAHFEKFSTYFTRFHDNRKNMYSDEDKHTAITYRLIHENLPRFIDNLQILATIKQKHSALYDQIINELTASGLDVSLASHLDGYHKLLTQEGITAYNTLLGGISGEAGSRKIQGINELINSHHNQHCHKSERIAKLRPLHKQILSDGMGVSFLPSKFADDSEMCQAVNEFYRHYADVFAKVQSLFDGFDDHQKDGIYVEHKNLNELSKQAFGDFALLGRVLDGYYVDVVNPEFNERFAKAKTDNAKAKLTKEKDKFIKGVHSLASLEQAIEHYTARHDDESVQAGKLGQYFKHGLAGVDNPIQKIHNNHSTIKGFLERERPAGERALPKIKSGKNPEMTQLRQLKELLDNALNVAHFAKLLTTKTTLDNQDGNFYGEFGALYDELAKIPTLYNKVRDYLSQKPFSTEKYKLNFGNPTLLNGWDLNKEKDNFGIILQKDGCYYLALLDKAHKKVFDNAPNTGKNVYQKMIYKLLPGPNKMLPKVFFAKSNLDYYNPSAELLDKYAQGTHKKGNNFNLKDCHALIDFFKAGINKHPEWQHFGFKFSPTSSYQDLSDFYREVEPQGYQVKFVDINADYINELVEQGQLYLFQIYNKDFSPKAHGKPNLHTLYFKALFSKDNLANPIYKLNGEAQIFYRKASLDMNETTIHRAGEVLENKNPDNPKKRQFVYDIIKDKRYTQDKFMLHVPITMNFGVQGMTIKEFNKKVNQSIQQYDEVNVIGIDRGERHLLYLTVINSKGEILEQRSLNDITTASANGTQMTTPYHKILDKREIERLNARVGWGEIETIKELKSGYLSHVVHQISQLMLKYNAIVVLEDLNFGFKRGRFKVEKQIYQNFENALIKKLNHLVLKDEADDEIGSYKNALQLTNNFTDLKSIGKQTGFLFYVPAWNTSKIDPETGFVDLLKPRYENIAQSQAFFGKFDKICYNADKDYFEFHIDYAKFTDKAKNSRQIWKICSHGDKRYVYDKTANQNKGATKGINVNDELKSLFARHHINDKQPNLVMDICQNNDKEFHKSLIYLLKTLLALRYSNASSDEDFILSPVANDEGMFFNSALADDTQPQNADANGAYHIALKGLWVLEQIKNSDDLNKVKLAIDNQTWLNFAQNRSAHHHHHHHHHH

SEQ ID NO: 78 - protein, 1285 aa, Artificial Sequence
  Synthetic sequence
MAPKKKRKVMLFQDFTHLYPLSKTMRFELKPIGKTLEHIHAKNFLSQDETMADMYQKVKAILDDYHRDFIADMMGEVKLTKLAEFYDVYLKFRKNPKDDGLQKQLKDLQAVLRKEIVKPIGNGGKYKAGYDRLFGAKLFKDGKELGDLAKFVIAQEGESSPKLAHLAHFEKFSTYFTGFHKNRKNMYSDEDKHTAITYRLIHENLPRFIDNLQILATIKQKHSALYDQIINELTASGLDVSLASHLDGYHKLLTQEGITAYNTLLGGISGEAGSRKIQGINELINSHHNQHCHKSERIAKLRPLHKQILSDGMGVSFLPSKFADDSEMCQAVNEFYRHYADVFAKVQSLFDGFDDHQKDGIYVEHKNLNELSKQAFGDFALLGRVLDGYYVDVVNPEFNERFAKAKTDNAKAKLTKEKDKFIKGVHSLASLEQAIEHYTARHDDESVQAGKLGQYFKHGLAGVDNPIQKIHNNHSTIKGFLERERPAGERALPKIKSGKNPEMTQLRQLKELLDNALNVAHFAKLLTTKTTLDNQDGNFYGEFGALYDELAKIPTLYNKVRDYLSQKPFSTEKYKLNFGNPTLLNGWDLNKEKDNFGIILQKDGCYYLALLDKAHKKVFDNAPNTGKNVYQKMIYKLLPGPNKMLPKVFFAKSNLDYYNPSAELLDKYAQGTHKKGNNFNLKDCHALIDFFKAGINKHPEWQHFGFKFSPTSSYQDLSDFYREVEPQGYQVKFVDINADYINELVEQGQLYLFQIYNKDFSPKAHGKPNLHTLYFKALFSKDNLANPIYKLNGEAQIFYRKASLDMNETTIHRAGEVLENKNPDNPKKRQFVYDIIKDKRYTQDKFMLHVPITMNFGVQGMTIKEFNKKVNQSIQQYDEVNVIGIDRGERHLLYLTVINSKGEILEQRSLNDITTASANGTQMTTPYHKILDKREIERLNARVGWGEIETIKELKSGYLSHVVHQISQLMLKYNAIVVLEDLNFGFKRGRFKVEKQIYQNFENALIKKLNHLVLKDEADDEIGSYKNALQLTNNFTDLKSIGKQTGFLFYVPAWNTSKIDPETGFVDLLKPRYENIAQSQAFFGKFDKICYNADKDYFEFHIDYAKFTDKAKNSRQIWKICSHGDKRYVYDKTANQNKGATKGINVNDELKSLFARHHINDKQPNLVMDICQNNDKEFHKSLIYLLKTLLALRYSNASSDEDFILSPVANDEGMFFNSALADDTQPQNADANGAYHIALKGLWVLEQIKNSDDLNKVKLAIDNQTWLNFAQNRSAHHHHHHHHHH

SEQ ID NO: 79 - protein, 1285 aa, Artificial Sequence
  Synthetic sequence
MAPKKKRKVMLFQDFTHLYPLSKTMRFELKPIGKTLEHIHAKNFLSQDETMADMYQKVKAILDDYHRDFIADMMGEVKLTKLAEFYDVYLKFRKNPKDDGLQKQLKDLQAVLRKEIVKPIGNGGKYKAGYDRLFGAKLFKDGKELGDLAKFVIAQEGESSPKLAHLAHFEKFSTYFTGFHDNRKRMYSDEDKHTAITYRLIHENLPRFIDNLQILATIKQKHSALYDQIINELTASGLDVSLASHLDGYHKLLTQEGITAYNTLLGGISGEAGSRKIQGINELINSHHNQHCHKSERIAKLRPLHKQILSDGMGVSFLPSKFADDSEMCQAVNEFYRHYADVFAKVQSLFDGFDDHQKDGIYVEHKNLNELSKQAFGDFALLGRVLDGYYVDVVNPEFNERFAKAKTDNAKAKLTKEKDKFIKGVHSLASLEQAIEHYTARHDDESVQAGKLGQYFKHGLAGVDNPIQKIHNNHSTIKGFLERERPAGERALPKIKSGKNPEMTQLRQLKELLDNALNVAHFAKLLTTKTTLDNQDGNFYGEFGALYDELAKIPTLYNKVRDYLSQKPFSTEKYKLNFGNPTLLNGWDLNKEKDNFGIILQKDGCYYLALLDKAHKKVFDNAPNTGKNVYQKMIYKLLPGPNKMLPKVFFAKSNLDYYNPSAELLDKYAQGTHKKGNNFNLKDCHALIDFFKAGINKHPEWQHFGFKFSPTSSYQDLSDFYREVEPQGYQVKFVDINADYINELVEQGQLYLFQIYNKDFSPKAHGKPNLHTLYFKALFSKDNLANPIYKLNGEAQIFYRKASLDMNETTIHRAGEVLENKNPDNPKKRQFVYDIIKDKRYTQDKFMLHVPITMNFGVQGMTIKEFNKKVNQSIQQYDEVNVIGIDRGERHLLYLTVINSKGEILEQRSLNDITTASANGTQMTTPYHKILDKREIERLNARVGWGEIETIKELKSGYLSHVVHQISQLMLKYNAIVVLEDLNFGFKRGRFKVEKQIYQNFENALIKKLNHLVLKDEADDEIGSYKNALQLTNNFTDLKSIGKQTGFLFYVPAWNTSKIDPETGFVDLLKPRYENIAQSQAFFGKFDKICYNADKDYFEFHIDYAKFTDKAKNSRQIWKICSHGDKRYVYDKTANQNKGATKGINVNDELKSLFARHHINDKQPNLVMDICQNNDKEFHKSLIYLLKTLLALRYSNASSDEDFILSPVANDEGMFFNSALADDTQPQNADANGAYHIALKGLWVLEQIKNSDDLNKVKLAIDNQTWLNFAQNRSAHHHHHHHHHH

SEQ ID NO: 80 - protein, 1285 aa, Artificial Sequence
  Synthetic sequence
MAPKKKRKVMLFQDFTHLYPLSKTMRFELKPIGKTLEHIHAKNFLSQDETMADMYQKVKAILDDYHRDFIADMMGEVKLTKLAEFYDVYLKFRKNPKDDGLQKQLKDLQAVLRKEIVKPIGNGGKYKAGYDRLFGAKLFKDGKELGDLAKFVIAQEGESSPKLAHLAHFEKFSTYFTGFHANRKNMYSDEDKHTAITYRLIHENLPRFIDNLQILATIKQKHSALYDQIINELTASGLDVSLASHLDGYHKLLTQEGITAYNTLLGGISGEAGSRKIQGINELINSHHNQHCHKSERIAKLRPLHKQILSDGMGVSFLPSKFADDSEMCQAVNEFYRHYADVFAKVQSLFDGFDDHQKDGIYVEHKNLNELSKQAFGDFALLGRVLDGYYVDVVNPEFNERFAKAKTDNAKAKLTKEKDKFIKGVHSLASLEQAIEHYTARHDDESVQAGKLGQYFKHGLAGVDNPIQKIHNNHSTIKGFLERERPAGERALPKIKSGKNPEMTQLRQLKELLDNALNVAHFAKLLTTKTTLDNQDGNFYGEFGALYDELAKIPTLYNKVRDYLSQKPFSTEKYKLNFGNPTLLNGWDLNKEKDNFGIILQKDGCYYLALLDKAHKKVFDNAPNTGKNVYQKMIYKLLPGPNKMLPKVFFAKSNLDYYNPSAELLDKYAQGTHKKGNNFNLKDCHALIDFFKAGINKHPEWQHFGFKFSPTSSYQDLSDFYREVEPQGYQVKFVDINADYINELVEQGQLYLFQIYNKDFSPKAHGKPNLHTLYFKALFSKDNLANPIYKLNGEAQIFYRKASLDMNETTIHRAGEVLENKNPDNPKKRQFVYDIIKDKRYTQDKFMLHVPITMNFGVQGMTIKEFNKKVNQSIQQYDEVNVIGIDRGERHLLYLTVINSKGEILEQRSLNDITTASANGTQMTTPYHKILDKREIERLNARVGWGEIETIKELKSGYLSHVVHQISQLMLKYNAIVVLEDLNFGFKRGRFKVEKQIYQNFENALIKKLNHLVLKDEADDEIGSYKNALQLTNNFTDLKSIGKQTGFLFYVPAWNTSKIDPETGFVDLLKPRYENIAQSQAFFGKFDKICYNADKDYFEFHIDYAKFTDKAKNSRQIWKICSHGDKRYVYDKTANQNKGATKGINVNDELKSLFARHHINDKQPNLVMDICQNNDKEFHKSLIYLLKTLLALRYSNASSDEDFILSPVANDEGMFFNSALADDTQPQNADANGAYHIALKGLWVLEQIKNSDDLNKVKLAIDNQTWLNFAQNRSAHHHHHHHHHH

SEQ ID NO: 81 - protein, 1351 aa, Artificial Sequence
  Synthetic sequence
MALFQDFTHLYPLSKTMRFELKPIGKTLEHIHAKNFLSQDETMADMYQKVKAILDDYHRDFIADMMGEVKLTKLAEFYDVYLKFRKNPKDDGLQKQLKDLQAVLRKEIVKPIGNGGKYKAGYDRLFGAKLFKDGKELGDLAKFVIAQEGESSPKLAHLAHFEKFSTYFTGFHDNRKNMYSDEDKHTAITYRLIHENLPRFIDNLQILATIKQKHSALYDQIINELTASGLDVSLASHLDGYHKLLTQEGITAYNTLLGGISGEAGSRKIQGINELINSHHNQHCHKSERIAKLRPLHKQILSDGMGVSFLPSKFADDSEMCQAVNEFYRHYADVFAKVQSLFDGFDDHQKDGIYVEHKNLNELSKQAFGDFALLGRVLDGYYVDVVNPEFNERFAKAKTDNAKAKLTKEKDKFIKGVHSLASLEQAIEHYTARHDDESVQAGKLGQYFKHGLAGVDNPIQKIHNNHSTIKGFLERERPAGERALPKIKSGKNPEMTQLRQLKELLDNALNVAHFAKLLTTKTTLDNQDGNFYGEFGALYDELAKIPTLYNKVRDYLSQKPFSTEKYKLNFGNPTLLNGWDLNKEKDNFGIILQKDGCYYLALLDKAHKKVFDNAPNTGKNVYQKMIYKLLPGPNKMLPKVFFAKSNLDYYNPSAELLDKYAQGTHKKGNNFNLKDCHALIDFFKAGINKHPEWQHFGFKFSPTSSYQDLSDFYREVEPQGYQVKFVDINADYINELVEQGQLYLFQIYNKDFSPKAHGKPNLHTLYFKALFSKDNLANPIYKLNGEAQIFYRKASLDMNETTIHRAGEVLENKNPDNPKKRQFVYDIIKDKRYTQDKFMLHVPITMNFGVQGMTIKEFNKKVNQSIQQYDEVNVIGIDRGERHLLYLTVINSKGEILEQRSLNDITTASANGTQMTTPYHKILDKREIERLNARVGWGEIETIKELKSGYLSHVVHQISQLMLKYNAIVVLEDLNFGFKRGRFKVEKQIYQNFENALIKKLNHLVLKDEADDEIGSYKNALQLTNNFTDLKSIGKQTGFLFYVPAWNTSKIDPETGFVDLLKPRYENIAQSQAFFGKFDKICYNADKDYFEFHIDYAKFTDKAKNSRQIWKICSHGDKRYVYDKTANQNKGATKGINVNDELKSLFARHHINDKQPNLVMDICQNNDKEFHKSLIYLLKTLLALRYSNASSDEDFILSPVANDEGMFFNSALADDTQPQNADANGAYHIALKGLWVLEQIKNSDDLNKVKLAIDNQTWLNFAQNRKRPAATKKAGQAKKKKGSYPYDVPDYAYPYDVPDYAYPYDVPDYAGSPKKKRKVGSGHHHHHHHHHHGSSGGSSGVSGWRLFKKIS

SEQ ID NO: 82 - protein, 1351 aa, Artificial Sequence
  Synthetic sequence
MALFQDFTHLYPLSKTMRFELKPIGKTLEHIHAKNFLSQDETMADMYQKVKAILDDYHRDFIADMMGEVKLTKLAEFYDVYLKFRKNPKDDGLQKQLKDLQAVLRKEIVKPIGNGGKYKAGYDRLFGAKLFKDGKELGDLAKFVIAQEGESSPKLAHLAHFEKFSTYFTGFHRNRKNMYSDEDKHTAITYRLIHENLPRFIDNLQILATIKQKHSALYDQIINELTASGLDVSLASHLDGYHKLLTQEGITAYNTLLGGISGEAGSRKIQGINELINSHHNQHCHKSERIAKLRPLHKQILSDGMGVSFLPSKFADDSEMCQAVNEFYRHYADVFAKVQSLFDGFDDHQKDGIYVEHKNLNELSKQAFGDFALLGRVLDGYYVDVVNPEFNERFAKAKTDNAKAKLTKEKDKFIKGVHSLASLEQAIEHYTARHDDESVQAGKLGQYFKHGLAGVDNPIQKIHNNHSTIKGFLERERPAGERALPKIKSGKNPEMTQLRQLKELLDNALNVAHFAKLLTTKTTLDNQDGNFYGEFGALYDELAKIPTLYNKVRDYLSQKPFSTEKYKLNFGNPTLLNGWDLNKEKDNFGIILQKDGCYYLALLDKAHKKVFDNAPNTGKNVYQKMIYKLLPGPNKMLPKVFFAKSNLDYYNPSAELLDKYAQGTHKKGNNFNLKDCHALIDFFKAGINKHPEWQHFGFKFSPTSSYQDLSDFYREVEPQGYQVKFVDINADYINELVEQGQLYLFQIYNKDFSPKAHGKPNLHTLYFKALFSKDNLANPIYKLNGEAQIFYRKASLDMNETTIHRAGEVLENKNPDNPKKRQFVYDIIKDKRYTQDKFMLHVPITMNFGVQGMTIKEFNKKVNQSIQQYDEVNVIGIDRGERHLLYLTVINSKGEILEQRSLNDITTASANGTQMTTPYHKILDKREIERLNARVGWGEIETIKELKSGYLSHVVHQISQLMLKYNAIVVLEDLNFGFKRGRFKVEKQIYQNFENALIKKLNHLVLKDEADDEIGSYKNALQLTNNFTDLKSIGKQTGFLFYVPAWNTSKIDPETGFVDLLKPRYENIAQSQAFFGKFDKICYNADKDYFEFHIDYAKFTDKAKNSRQIWKICSHGDKRYVYDKTANQNKGATKGINVNDELKSLFARHHINDKQPNLVMDICQNNDKEFHKSLIYLLKTLLALRYSNASSDEDFILSPVANDEGMFFNSALADDTQPQNADANGAYHIALKGLWVLEQIKNSDDLNKVKLAIDNQTWLNFAQNRKRPAATKKAGQAKKKKGSYPYDVPDYAYPYDVPDYAYPYDVPDYAGSPKKKRKVGSGHHHHHHHHHHGSSGGSSGVSGWRLFKKIS

SEQ ID NO: 83 - protein, 1351 aa, Artificial Sequence
  Synthetic sequence
MALFQDFTHLYPLSKTMRFELKPIGKTLEHIHAKNFLSQDETMADMYQKVKAILDDYHRDFIADMMGEVKLTKLAEFYDVYLKFRKNPKDDGLQKQLKDLQAVLRKEIVKPIGNGGKYKAGYDRLFGAKLFKDGKELGDLAKFVIAQEGESSPKLAHLAHFEKFSTYFTGFHDNRKNMYSDEDKHTAITYRLIHENLPRFIDNLQILATIKQKHSALYDQIINELTASGLDVSLASHLDGYHKLLTQEGITAYNTLLGGISGEAGSRKIQGINELINSHHNQHCHKSERIAKLRPLHKQILSDGMGVSFLPSKFADDSEMCQAVNEFYRHYADVFAKVQSLFDGFDDHQKDGIYVEHKNLNELSKQAFGDFALLGRVLDGYYVDVVNPEFNERFAKAKTDNAKAKLTKEKDKFIKGVHSLASLEQAIEHYTARHDDESVQAGKLGQYFKHGLAGVDNPIQKIHNNHSTIKGFLERERPAGERALPKIKSGKNPEMTQLRQLKELLDNALNVAHFAKLLTTKTTLDNQDGNFYGEFGALYDELAKIPTLYNKVRDYLSQKPFSTEKYKLNFGRPTLLNGWDLNKEKDNFGIILQKDGCYYLALLDKAHKKVFDNAPNTGKNVYQKMIYKLLPGPNKMLPKVFFAKSNLDYYNPSAELLDKYAQGTHKKGNNFNLKDCHALIDFFKAGINKHPEWQHFGFKFSPTSSYQDLSDFYREVEPQGYQVKFVDINADYINELVEQGQLYLFQIYNKDFSPKAHGKPNLHTLYFKALFSKDNLANPIYKLNGEAQIFYRKASLDMNETTIHRAGEVLENKNPDNPKKRQFVYDIIKDKRYTQDKFMLHVPITMNFGVQGMTIKEFNKKVNQSIQQYDEVNVIGIDRGERHLLYLTVINSKGEILEQRSLNDITTASANGTQMTTPYHKILDKREIERLNARVGWGEIETIKELKSGYLSHVVHQISQLMLKYNAIVVLEDLNFGFKRGRFKVEKQIYQNFENALIKKLNHLVLKDEADDEIGSYKNALQLTNNFTDLKSIGKQTGFLFYVPAWNTSKIDPETGFVDLLKPRYENIAQSQAFFGKFDKICYNADKDYFEFHIDYAKFTDKAKNSRQIWKICSHGDKRYVYDKTANQNKGATKGINVNDELKSLFARHHINDKQPNLVMDICQNNDKEFHKSLIYLLKTLLALRYSNASSDEDFILSPVANDEGMFFNSALADDTQPQNADANGAYHIALKGLWVLEQIKNSDDLNKVKLAIDNQTWLNFAQNRKRPAATKKAGQAKKKKGSYPYDVPDYAYPYDVPDYAYPYDVPDYAGSPKKKRKVGSGHHHHHHHHHHGSSGGSSGVSGWRLFKKIS

SEQ ID NO: 84 - protein, 1351 aa, Artificial Sequence
  Synthetic sequence
MALFQDFTHLYPLSKTMRFELKPIGKTLEHIHAKNFLSQDETMADMYQKVKAILDDYHRDFIADMMGEVKLTKLAEFYDVYLKFRKNPKDDGLQKQLKDLQAVLRKEIVKPIGNGGKYKAGYDRLFGAKLFKDGKELGDLAKFVIAQEGESSPKLAHLAHFEKFSTYFTGFHDNRKNMYSDEDKHTAITYRLIHENLPRFIDNLQILATIKQKHSALYDQIINELTASGLDVSLASHLDGYHKLLTQEGITAYNTLLGGISGEAGSRKIQGINELINSHHNQHCHKSERIAKLRPLHKQILSDGMGVSFLPSKFADDSEMCQAVNEFYRHYADVFAKVQSLFDGFDDHQKDGIYVEHKNLNELSKQAFGDFALLGRVLDGYYVDVVNPEFNERFAKAKTDNAKAKLTKEKDKFIKGVHSLASLEQAIEHYTARHDDESVQAGKLGQYFKHGLAGVDNPIQKIHNNHSTIKGFLERERPAGERALPKIKSGKNPEMTQLRQLKELLDNALNVAHFAKLLTTKTTLDNQDGNFYGEFGALYDELAKIPTLYNKVRDYLSQKPFSTEKYKLNFGNPTLLNGWDLNKEKDNFGIILQKDGCYYLALLDKAHKKVFDNAPNTGKNVYQKMIYKLLPGPNKMLPKVFFAKSNLDYYNPSAELLDKYAQGTHKKGNNFNLKDCHALIDFFKAGINKHPEWQHFGFKFSPTSSYQDLSDFYREVEPQGYQVKFVDINADYINELVEQGQLYLFQIYNKDFSPKAHGKPNLHTLYFKALFSKDNLANPIYKLNGEAQIFYRKASLDMNETTIHRAGEVLENKNPDNPKKRQFVYDIIKDKRYTQDKFLLHVPITMNFGVQGMTIKEFNKKVNQSIQQYDEVNVIGIDRGERHLLYLTVINSKGEILEQRSLNDITTASANGTQMTTPYHKILDKREIERLNARVGWGEIETIKELKSGYLSHVVHQISQLMLKYNAIVVLEDLNFGFKRGRFKVEKQIYQNFENALIKKLNHLVLKDEADDEIGSYKNALQLTNNFTDLKSIGKQTGFLFYVPAWNTSKIDPETGFVDLLKPRYENIAQSQAFFGKFDKICYNADKDYFEFHIDYAKFTDKAKNSRQIWKICSHGDKRYVYDKTANQNKGATKGINVNDELKSLFARHHINDKQPNLVMDICQNNDKEFHKSLIYLLKTLLALRYSNASSDEDFILSPVANDEGMFFNSALADDTQPQNADANGAYHIALKGLWVLEQIKNSDDLNKVKLAIDNQTWLNFAQNRKRPAATKKAGQAKKKKGSYPYDVPDYAYPYDVPDYAYPYDVPDYAGSPKKKRKVGSGHHHHHHHHHHGSSGGSSGVSGWRLFKKIS

SEQ ID NO: 85 - protein, 1351 aa, Artificial Sequence
  Synthetic sequence
MALFQDFTHLYPLSKTMRFELKPIGKTLEHIHAKNFLSQDETMADMYQKVKAILDDYHRDFIADMMGEVKLTKLAEFYDVYLKFRKNPKDDGLQKQLKDLQAVLRKEIVKPIGNGGKYKAGYDRLFGAKLFKDGKELGDLAKFVIAQEGESSPKLAHLAHFEKFSTYFTGFHDNRKNMYSDEDKHTAITYRLIHENLPRFIDNLQILATIKQKHSALYDQIINELTASGLDVSLASHLDGYHKLLTQEGITAYNTLLGGISGEAGSRKIQGINELINSHHNQHCHKSERIAKLRPLHKQILSDGMGVSFLPSKFADDSEMCQAVNEFYRHYADVFAKVQSLFDGFDDHQKDGIYVEHKNLNELSKQAFGDFALLGRVLDGYYVDVVNPEFNERFAKAKTDNAKAKLTKEKDKFIKGVHSLASLEQAIEHYTARHDDESVQAGKLGQYFKHGLAGVDNPIQKIHNNHSTIKGFLERERPAGERALPKIKSGKNPEMTQLRQLKELLDNALNVAHFAKLLTTKTTLDNQDGNFYGEFGALYDELAKIPTLYNKVRDYLSQKPFSTEKYKLNFGRPTLLNGWDLNKEKDNFGIILQKDGCYYLALLDKAHKKVFDNAPNTGKNVYQKMIYKLLPGPNKMLPKVFFAKSNLDYYNPSAELLDKYAQGTHKKGNNFNLKDCHALIDFFKAGINKHPEWQHFGFKFSPTSSYQDLSDFYREVEPQGYQVKFVDINADYINELVEQGQLYLFQIYNKDFSPKAHGKPNLHTLYFKALFSKDNLANPIYKLNGEAQIFYRKASLDMNETTIHRAGEVLENKNPDNPKKRQFVYDIIKDKRYTQDKFLLHVPITMNFGVQGMTIKEFNKKVNQSIQQYDEVNVIGIDRGERHLLYLTVINSKGEILEQRSLNDITTASANGTQMTTPYHKILDKREIERLNARVGWGEIETIKELKSGYLSHVVHQISQLMLKYNAIVVLEDLNFGFKRGRFKVEKQIYQNFENALIKKLNHLVLKDEADDEIGSYKNALQLTNNFTDLKSIGKQTGFLFYVPAWNTSKIDPETGFVDLLKPRYENIAQSQAFFGKFDKICYNADKDYFEFHIDYAKFTDKAKNSRQIWKICSHGDKRYVYDKTANQNKGATKGINVNDELKSLFARHHINDKQPNLVMDICQNNDKEFHKSLIYLLKTLLALRYSNASSDEDFILSPVANDEGMFFNSALADDTQPQNADANGAYHIALKGLWVLEQIKNSDDLNKVKLAIDNQTWLNFAQNRKRPAATKKAGQAKKKKGSYPYDVPDYAYPYDVPDYAYPYDVPDYAGSPKKKRKVGSGHHHHHHHHHHGSSGGSSGVSGWRLFKKIS

SEQ ID NO: 86 - protein, 1351 aa, Artificial Sequence
  Synthetic sequence
MALFQDFTHLYPLSKTMRFELKPIGKTLEHIHAKNFLSQDETMADMYQKVKAILDDYHRDFIADMMGEVKLTKLAEFYDVYLKFRKNPKDDGLQKQLKDLQAVLRKEIVKPIGNGGKYKAGYDRLFGAKLFKDGKELGDLAKFVIAQEGESSPKLAHLAHFEKFSTYFTGFHRNRKNMYSDEDKHTAITYRLIHENLPRFIDNLQILATIKQKHSALYDQIINELTASGLDVSLASHLDGYHKLLTQEGITAYNTLLGGISGEAGSRKIQGINELINSHHNQHCHKSERIAKLRPLHKQILSDGMGVSFLPSKFADDSEMCQAVNEFYRHYADVFAKVQSLFDGFDDHQKDGIYVEHKNLNELSKQAFGDFALLGRVLDGYYVDVVNPEFNERFAKAKTDNAKAKLTKEKDKFIKGVHSLASLEQAIEHYTARHDDESVQAGKLGQYFKHGLAGVDNPIQKIHNNHSTIKGFLERERPAGERALPKIKSGKNPEMTQLRQLKELLDNALNVAHFAKLLTTKTTLDNQDGNFYGEFGALYDELAKIPTLYNKVRDYLSQKPFSTEKYKLNFGRPTLLNGWDLNKEKDNFGIILQKDGCYYLALLDKAHKKVFDNAPNTGKNVYQKMIYKLLPGPNKMLPKVFFAKSNLDYYNPSAELLDKYAQGTHKKGNNFNLKDCHALIDFFKAGINKHPEWQHFGFKFSPTSSYQDLSDFYREVEPQGYQVKFVDINADYINELVEQGQLYLFQIYNKDFSPKAHGKPNLHTLYFKALFSKDNLANPIYKLNGEAQIFYRKASLDMNETTIHRAGEVLENKNPDNPKKRQFVYDIIKDKRYTQDKFMLHVPITMNFGVQGMTIKEFNKKVNQSIQQYDEVNVIGIDRGERHLLYLTVINSKGEILEQRSLNDITTASANGTQMTTPYHKILDKREIERLNARVGWGEIETIKELKSGYLSHVVHQISQLMLKYNAIVVLEDLNFGFKRGRFKVEKQIYQNFENALIKKLNHLVLKDEADDEIGSYKNALQLTNNFTDLKSIGKQTGFLFYVPAWNTSKIDPETGFVDLLKPRYENIAQSQAFFGKFDKICYNADKDYFEFHIDYAKFTDKAKNSRQIWKICSHGDKRYVYDKTANQNKGATKGINVNDELKSLFARHHINDKQPNLVMDICQNNDKEFHKSLIYLLKTLLALRYSNASSDEDFILSPVANDEGMFFNSALADDTQPQNADANGAYHIALKGLWVLEQIKNSDDLNKVKLAIDNQTWLNFAQNRKRPAATKKAGQAKKKKGSYPYDVPDYAYPYDVPDYAYPYDVPDYAGSPKKKRKVGSGHHHHHHHHHHGSSGGSSGVSGWRLFKKIS

SEQ ID NO: 87 - protein, 1351 aa, Artificial Sequence
  Synthetic sequence
MALFQDFTHLYPLSKTMRFELKPIGKTLEHIHAKNFLSQDETMADMYQKVKAILDDYHRDFIADMMGEVKLTKLAEFYDVYLKFRKNPKDDGLQKQLKDLQAVLRKEIVKPIGNGGKYKAGYDRLFGAKLFKDGKELGDLAKFVIAQEGESSPKLAHLAHFEKFSTYFTGFHRNRKNMYSDEDKHTAITYRLIHENLPRFIDNLQILATIKQKHSALYDQIINELTASGLDVSLASHLDGYHKLLTQEGITAYNTLLGGISGEAGSRKIQGINELINSHHNQHCHKSERIAKLRPLHKQILSDGMGVSFLPSKFADDSEMCQAVNEFYRHYADVFAKVQSLFDGFDDHQKDGIYVEHKNLNELSKQAFGDFALLGRVLDGYYVDVVNPEFNERFAKAKTDNAKAKLTKEKDKFIKGVHSLASLEQAIEHYTARHDDESVQAGKLGQYFKHGLAGVDNPIQKIHNNHSTIKGFLERERPAGERALPKIKSGKNPEMTQLRQLKELLDNALNVAHFAKLLTTKTTLDNQDGNFYGEFGALYDELAKIPTLYNKVRDYLSQKPFSTEKYKLNFGNPTLLNGWDLNKEKDNFGIILQKDGCYYLALLDKAHKKVFDNAPNTGKNVYQKMIYKLLPGPNKMLPKVFFAKSNLDYYNPSAELLDKYAQGTHKKGNNFNLKDCHALIDFFKAGINKHPEWQHFGFKFSPTSSYQDLSDFYREVEPQGYQVKFVDINADYINELVEQGQLYLFQIYNKDFSPKAHGKPNLHTLYFKALFSKDNLANPIYKLNGEAQIFYRKASLDMNETTIHRAGEVLENKNPDNPKKRQFVYDIIKDKRYTQDKFLLHVPITMNFGVQGMTIKEFNKKVNQSIQQYDEVNVIGIDRGERHLLYLTVINSKGEILEQRSLNDITTASANGTQMTTPYHKILDKREIERLNARVGWGEIETIKELKSGYLSHVVHQISQLMLKYNAIVVLEDLNFGFKRGRFKVEKQIYQNFENALIKKLNHLVLKDEADDEIGSYKNALQLTNNFTDLKSIGKQTGFLFYVPAWNTSKIDPETGFVDLLKPRYENIAQSQAFFGKFDKICYNADKDYFEFHIDYAKFTDKAKNSRQIWKICSHGDKRYVYDKTANQNKGATKGINVNDELKSLFARHHINDKQPNLVMDICQNNDKEFHKSLIYLLKTLLALRYSNASSDEDFILSPVANDEGMFFNSALADDTQPQNADANGAYHIALKGLWVLEQIKNSDDLNKVKLAIDNQTWLNFAQNRKRPAATKKAGQAKKKKGSYPYDVPDYAYPYDVPDYAYPYDVPDYAGSPKKKRKVGSGHHHHHHHHHHGSSGGSSGVSGWRLFKKIS

SEQ ID NO: 88 - protein, 1351 aa, Artificial Sequence
  Synthetic sequence
MALFQDFTHLYPLSKTMRFELKPIGKTLEHIHAKNFLSQDETMADMYQKVKAILDDYHRDFIADMMGEVKLTKLAEFYDVYLKFRKNPKDDGLQKQLKDLQAVLRKEIVKPIGNGGKYKAGYDRLFGAKLFKDGKELGDLAKFVIAQEGESSPKLAHLAHFEKFSTYFTGFHRNRKNMYSDEDKHTAITYRLIHENLPRFIDNLQILATIKQKHSALYDQIINELTASGLDVSLASHLDGYHKLLTQEGITAYNTLLGGISGEAGSRKIQGINELINSHHNQHCHKSERIAKLRPLHKQILSDGMGVSFLPSKFADDSEMCQAVNEFYRHYADVFAKVQSLFDGFDDHQKDGIYVEHKNLNELSKQAFGDFALLGRVLDGYYVDVVNPEFNERFAKAKTDNAKAKLTKEKDKFIKGVHSLASLEQAIEHYTARHDDESVQAGKLGQYFKHGLAGVDNPIQKIHNNHSTIKGFLERERPAGERALPKIKSGKNPEMTQLRQLKELLDNALNVAHFAKLLTTKTTLDNQDGNFYGEFGALYDELAKIPTLYNKVRDYLSQKPFSTEKYKLNFGRPTLLNGWDLNKEKDNFGIILQKDGCYYLALLDKAHKKVFDNAPNTGKNVYQKMIYKLLPGPNKMLPKVFFAKSNLDYYNPSAELLDKYAQGTHKKGNNFNLKDCHALIDFFKAGINKHPEWQHFGFKFSPTSSYQDLSDFYREVEPQGYQVKFVDINADYINELVEQGQLYLFQIYNKDFSPKAHGKPNLHTLYFKALFSKDNLANPIYKLNGEAQIFYRKASLDMNETTIHRAGEVLENKNPDNPKKRQFVYDIIKDKRYTQDKFLLHVPITMNFGVQGMTIKEFNKKVNQSIQQYDEVNVIGIDRGERHLLYLTVINSKGEILEQRSLNDITTASANGTQMTTPYHKILDKREIERLNARVGWGEIETIKELKSGYLSHVVHQISQLMLKYNAIVVLEDLNFGFKRGRFKVEKQIYQNFENALIKKLNHLVLKDEADDEIGSYKNALQLTNNFTDLKSIGKQTGFLFYVPAWNTSKIDPETGFVDLLKPRYENIAQSQAFFGKFDKICYNADKDYFEFHIDYAKFTDKAKNSRQIWKICSHGDKRYVYDKTANQNKGATKGINVNDELKSLFARHHINDKQPNLVMDICQNNDKEFHKSLIYLLKTLLALRYSNASSDEDFILSPVANDEGMFFNSALADDTQPQNADANGAYHIALKGLWVLEQIKNSDDLNKVKLAIDNQTWLNFAQNRKRPAATKKAGQAKKKKGSYPYDVPDYAYPYDVPDYAYPYDVPDYAGSPKKKRKVGSGHHHHHHHHHHGSSGGSSGVSGWRLFKKIS

SEQ ID NO: 89 - protein, 1351 aa, Artificial Sequence
  Synthetic sequence
MALFQDFTHLYPLSKTMRFELKPIGKTLEHIHAKNFLSQDETMADMYQKVKAILDDYHRDFIADMMGEVKLTKLAEFYDVYLKFRKNPKDDGLQKQLKDLQAVLRKEIVKPIGNGGKYKAGYDRLFGAKLFKDGKELGDLAKFVIAQEGESSPKLAHLAHFEKFSTYFTGFHRNRKNMYSDEDKHTAITYRLIHENLPRFIDNLQILATIKQKHSALYDQIINELTASGLDVSLASHLDGYHKLLTQEGITAYNTLLGGISGEAGSRKIQGINELINSHHNQHCHKSERIAKLRPLHKQILSDGMGVSFLPSKFADDSEMCQAVNEFYRHYADVFAKVQSLFDGFDDHQKDGIYVEHKNLNELSKQAFGDFALLGRVLDGYYVDVVNPEFNERFAKAKTDNAKAKLTKEKDKFIKGVHSLASLEQAIEHYTARHDDESVQAGKLGQYFKHGLAGVDNPIQKIHNNHSTIKGFLERERPAGERALPKIKSGKNPEMTQLRQLKELLDNALNVAHFAKLLTTKTTLDNQDGNFYGEFGALYDRLAKIPTLYNKVRDYLSQKPFSTEKYKLNFGNPTLLNGWDLNKEKDNFGIILQKDGCYYLALLDKAHKKVFDNAPNTGKNVYQKMIYKLLPGPNKMLPKVFFAKSNLDYYNPSAELLDKYAQGTHKKGNNFNLKDCHALIDFFKAGINKHPEWQHFGFKFSPTSSYQDLSDFYREVEPQGYQVKFVDINADYINELVEQGQLYLFQIYNKDFSPKAHGKPNLHTLYFKALFSKDNLANPIYKLNGEAQIFYRKASLDMNETTIHRAGEVLENKNPDNPKKRQFVYDIIKDKRYTQDKFMLHVPITMNFGVQGMTIKEFNKKVNQSIQQYDEVNVIGIDRGERHLLYLTVINSKGEILEQRSLNDITTASANGTQMTTPYHKILDKREIERLNARVGWGEIETIKELKSGYLSHVVHQISQLMLKYNAIVVLEDLNFGFKRGRFKVEKQIYQNFENALIKKLNHLVLKDEADDEIGSYKNALQLTNNFTDLKSIGKQTGFLFYVPAWNTSKIDPETGFVDLLKPRYENIAQSQAFFGKFDKICYNADKDYFEFHIDYAKFTDKAKNSRQIWKICSHGDKRYVYDKTANQNKGATKGINVNDELKSLFARHHINDKQPNLVMDICQNNDKEFHKSLIYLLKTLLALRYSNASSDEDFILSPVANDEGMFFNSALADDTQPQNADANGAYHIALKGLWVLEQIKNSDDLNKVKLAIDNQTWLNFAQNRKRPAATKKAGQAKKKKGSYPYDVPDYAYPYDVPDYAYPYDVPDYAGSPKKKRKVGSGHHHHHHHHHHGSSGGSSGVSGWRLFKKIS

SEQ ID NO: 90 - protein, 1351 aa, Artificial Sequence
  Synthetic sequence
MALFQDFTHLYPLSKTMRFELKPIGKTLEHIHAKNFLSQDETMADMYQKVKAILDDYHRDFIADMMGEVKLTKLAEFYDVYLKFRKNPKDDGLQKQLKDLQAVLRKEIVKPIGNGGKYKAGYDRLFGAKLFKDGKELGDLAKFVIAQEGESSPKLAHLAHFEKFSTYFTGFHRNRKNMYSDEDKHTAITYRLIHENLPRFIDNLQILATIKQKHSALYDQIINELTASGLDVSLASHLDGYHKLLTQEGITAYNTLLGGISGEAGSRKIQGINELINSHHNQHCHKSERIAKLRPLHKQILSDGMGVSFLPSKFADDSEMCQAVNEFYRHYADVFAKVQSLFDGFDDHQKDGIYVEHKNLNELSKQAFGDFALLGRVLDGYYVDVVNPEFNERFAKAKTDNAKAKLTKEKDKFIKGVHSLASLEQAIEHYTARHDDESVQAGKLGQYFKHGLAGVDNPIQKIHNNHSTIKGFLERERPAGERALPKIKSGKNPEMTQLRQLKELLDNALNVAHFAKLLTTKTTLDNQDGNFYGEFGALYDELAKIPTLYNKVRDYLSQKPFSTEKYKLNFGNPTLLNGWDLNKEKDNFGIILQKDGCYYLALLDKAHKKVFDNAPNTGKNVYQKMIYKLLGGPNKMLPKVFFAKSNLDYYNPSAELLDKYAQGTHKKGNNFNLKDCHALIDFFKAGINKHPEWQHFGFKFSPTSSYQDLSDFYREVEPQGYQVKFVDINADYINELVEQGQLYLFQIYNKDFSPKAHGKPNLHTLYFKALFSKDNLANPIYKLNGEAQIFYRKASLDMNETTIHRAGEVLENKNPDNPKKRQFVYDIIKDKRYTQDKFMLHVPITMNFGVQGMTIKEFNKKVNQSIQQYDEVNVIGIDRGERHLLYLTVINSKGEILEQRSLNDITTASANGTQMTTPYHKILDKREIERLNARVGWGEIETIKELKSGYLSHVVHQISQLMLKYNAIVVLEDLNFGFKRGRFKVEKQIYQNFENALIKKLNHLVLKDEADDEIGSYKNALQLTNNFTDLKSIGKQTGFLFYVPAWNTSKIDPETGFVDLLKPRYENIAQSQAFFGKFDKICYNADKDYFEFHIDYAKFTDKAKNSRQIWKICSHGDKRYVYDKTANQNKGATKGINVNDELKSLFARHHINDKQPNLVMDICQNNDKEFHKSLIYLLKTLLALRYSNASSDEDFILSPVANDEGMFFNSALADDTQPQNADANGAYHIALKGLWVLEQIKNSDDLNKVKLAIDNQTWLNFAQNRKRPAATKKAGQAKKKKGSYPYDVPDYAYPYDVPDYAYPYDVPDYAGSPKKKRKVGSGHHHHHHHHHHGSSGGSSGVSGWRLFKKIS

SEQ ID NO: 91 - protein, 1351 aa, Artificial Sequence
  Synthetic sequence
MALFQDFTHLYPLSKTMRFELKPIGKTLEHIHAKNFLSQDETMADMYQKVKAILDDYHRDFIADMMGEVKLTKLAEFYDVYLKFRKNPKDDGLQKQLKDLQAVLRKEIVKPIGNGGKYKAGYDRLFGAKLFKDGKELGDLAKFVIAQEGESSPKLAHLAHFEKFSTYFTGFHRNRKNMYSDEDKHTAITYRLIHENLPRFIDNLQILATIKQKHSALYDQIINELTASGLDVSLASHLDGYHKLLTQEGITAYNTLLGGISGEAGSRKIQGINELINSHHNQHCHKSERIAKLRPLHKQILSDGMGVSFLPSKFADDSEMCQAVNEFYRHYADVFAKVQSLFDGFDDHQKDGIYVEHKNLNELSKQAFGDFALLGRVLDGYYVDVVNPEFNERFAKAKTDNAKAKLTKEKDKFIKGVHSLASLEQAIEHYTARHDDESVQAGKLGQYFKHGLAGVDNPIQKIHNNHSTIKGFLERERPAGERALPKIKSGKNPEMTQLRQLKELLDNALNVAHFAKLLTTKTTLDNQDGNFYGEFGALYDELAKIPTLYNKVRDYLSQKPFSTEKYKLNFGNPTLLNGWDLNKEKDNFGIILQKDGCYYLALLDKAHKKVFDNAPNTGKNVYQKMIYKLLPGPNKMLPKVFFAKSNLDYYNESAELLDKYAQGTHKKGNNFNLKDCHALIDFFKAGINKHPEWQHFGFKFSPTSSYQDLSDFYREVEPQGYQVKFVDINADYINELVEQGQLYLFQIYNKDFSPKAHGKPNLHTLYFKALFSKDNLANPIYKLNGEAQIFYRKASLDMNETTIHRAGEVLENKNPDNPKKRQFVYDIIKDKRYTQDKFMLHVPITMNFGVQGMTIKEFNKKVNQSIQQYDEVNVIGIDRGERHLLYLTVINSKGEILEQRSLNDITTASANGTQMTTPYHKILDKREIERLNARVGWGEIETIKELKSGYLSHVVHQISQLMLKYNAIVVLEDLNFGFKRGRFKVEKQIYQNFENALIKKLNHLVLKDEADDEIGSYKNALQLTNNFTDLKSIGKQTGFLFYVPAWNTSKIDPETGFVDLLKPRYENIAQSQAFFGKFDKICYNADKDYFEFHIDYAKFTDKAKNSRQIWKICSHGDKRYVYDKTANQNKGATKGINVNDELKSLFARHHINDKQPNLVMDICQNNDKEFHKSLIYLLKTLLALRYSNASSDEDFILSPVANDEGMFFNSALADDTQPQNADANGAYHIALKGLWVLEQIKNSDDLNKVKLAIDNQTWLNFAQNRKRPAATKKAGQAKKKKGSYPYDVPDYAYPYDVPDYAYPYDVPDYAGSPKKKRKVGSGHHHHHHHHHHGSSGGSSGVSGWRLFKKIS

SEQ ID NO: 92 - protein, 1351 aa, Artificial Sequence
  Synthetic sequence
MALFQDFTHLYPLSKTMRFELKPIGKTLEHIHAKNFLSQDETMADMYQKVKAILDDYHRDFIADMMGEVKLTKLAEFYDVYLKFRKNPKDDGLQKQLKDLQAVLRKEIVKPIGNGGKYKAGYDRLFGAKLFKDGKELGDLAKFVIAQEGESSPKLAHLAHFEKFSTYFTGFHRNRKNMYSDEDKHTAITYRLIHENLPRFIDNLQILATIKQKHSALYDQIINELTASGLDVSLASHLDGYHKLLTQEGITAYNTLLGGISGEAGSRKIQGINELINSHHNQHCHKSERIAKLRPLHKQILSDGMGVSFLPSKFADDSEMCQAVNEFYRHYADVFAKVQSLFDGFDDHQKDGIYVEHKNLNELSKQAFGDFALLGRVLDGYYVDVVNPEFNERFAKAKTDNAKAKLTKEKDKFIKGVHSLASLEQAIEHYTARHDDESVQAGKLGQYFKHGLAGVDNPIQKIHNNHSTIKGFLERERPAGERALPKIKSGKNPEMTQLRQLKELLDNALNVAHFAKLLTTKTTLDNQDGNFYGEFGALYKELAKIPTLYNKVRDYLSQKPFSTEKYKLNFGNPTLLNGWDLNKEKDNFGIILQKDGCYYLALLDKAHKKVFDNAPNTGKNVYQKMIYKLLPGPNKMLPKVFFAKSNLDYYNPSAELLDKYAQGTHKKGNNFNLKDCHALIDFFKAGINKHPEWQHFGFKFSPTSSYQDLSDFYREVEPQGYQVKFVDINADYINELVEQGQLYLFQIYNKDFSPKAHGKPNLHTLYFKALFSKDNLANPIYKLNGEAQIFYRKASLDMNETTIHRAGEVLENKNPDNPKKRQFVYDIIKDKRYTQDKFMLHVPITMNFGVQGMTIKEFNKKVNQSIQQYDEVNVIGIDRGERHLLYLTVINSKGEILEQRSLNDITTASANGTQMTTPYHKILDKREIERLNARVGWGEIETIKELKSGYLSHVVHQISQLMLKYNAIVVLEDLNFGFKRGRFKVEKQIYQNFENALIKKLNHLVLKDEADDEIGSYKNALQLTNNFTDLKSIGKQTGFLFYVPAWNTSKIDPETGFVDLLKPRYENIAQSQAFFGKFDKICYNADKDYFEFHIDYAKFTDKAKNSRQIWKICSHGDKRYVYDKTANQNKGATKGINVNDELKSLFARHHINDKQPNLVMDICQNNDKEFHKSLIYLLKTLLALRYSNASSDEDFILSPVANDEGMFFNSALADDTQPQNADANGAYHIALKGLWVLEQIKNSDDLNKVKLAIDNQTWLNFAQNRKRPAATKKAGQAKKKKGSYPYDVPDYAYPYDVPDYAYPYDVPDYAGSPKKKRKVGSGHHHHHHHHHHGSSGGSSGVSGWRLFKKIS

SEQ ID NO: 93 - protein, 1351 aa, Artificial Sequence
  Synthetic sequence
MALFQDFTHLYPLSKTMRFELKPIGKTLEHIHAKNFLSQDETMADMYQKVKAILDDYHRDFIADMMGEVKLTKLAEFYDVYLKFRKNPKDDGLQKQLKDLQAVLRKEIVKPIGNGGKYKAGYDRLFGAKLFKDGKELGDLAKFVIAQEGESSPKLAHLAHFEKFSTYFTGFHRNRKNMYSDEDKHTAITYRLIHENLPRFIDNLQILATIKQKHSALYDQIINELTASGLDVSLASHLDGYHKLLTQEGITAYNTLLGGISGEAGSRKIQGINELINSHHNQHCHKSERIAKLRPLHKQILSDGMGVSFLPSKFADDSEMCQAVNEFYRHYADVFAKVQSLFDGFDDHQKDGIYVEHKNLNELSKQAFGDFALLGRVLDGYYVDVVNPEFNERFAKAKTDNAKAKLTKEKDKFIKGVHSLASLEQAIEHYTARHDDESVQAGKLGQYFKHGLAGVDNPIQKIHNNHSTIKGFLERERPAGERALPKIKSGKNPEMTQLRQLKELLDNALNVAHFAKLLTTKTTLDNQDGNFYGEFGALYDELAKIPTLYVKVRDYLSQKPFSTEKYKLNFGNPTLLNGWDLNKEKDNFGIILQKDGCYYLALLDKAHKKVFDNAPNTGKNVYQKMIYKLLPGPNKMLPKVFFAKSNLDYYNPSAELLDKYAQGTHKKGNNFNLKDCHALIDFFKAGINKHPEWQHFGFKFSPTSSYQDLSDFYREVEPQGYQVKFVDINADYINELVEQGQLYLFQIYNKDFSPKAHGKPNLHTLYFKALFSKDNLANPIYKLNGEAQIFYRKASLDMNETTIHRAGEVLENKNPDNPKKRQFVYDIIKDKRYTQDKFMLHVPITMNFGVQGMTIKEFNKKVNQSIQQYDEVNVIGIDRGERHLLYLTVINSKGEILEQRSLNDITTASANGTQMTTPYHKILDKREIERLNARVGWGEIETIKELKSGYLSHVVHQISQLMLKYNAIVVLEDLNFGFKRGRFKVEKQIYQNFENALIKKLNHLVLKDEADDEIGSYKNALQLTNNFTDLKSIGKQTGFLFYVPAWNTSKIDPETGFVDLLKPRYENIAQSQAFFGKFDKICYNADKDYFEFHIDYAKFTDKAKNSRQIWKICSHGDKRYVYDKTANQNKGATKGINVNDELKSLFARHHINDKQPNLVMDICQNNDKEFHKSLIYLLKTLLALRYSNASSDEDFILSPVANDEGMFFNSALADDTQPQNADANGAYHIALKGLWVLEQIKNSDDLNKVKLAIDNQTWLNFAQNRKRPAATKKAGQAKKKKGSYPYDVPDYAYPYDVPDYAYPYDVPDYAGSPKKKRKVGSGHHHHHHHHHHGSSGGSSGVSGWRLFKKIS

SEQ ID NO: 94 - protein, 1351 aa, Artificial Sequence
  Synthetic sequence
MALFQDFTHLYPLSKTMRFELKPIGKTLEHIHAKNFLSQDETMADMYQKVKAILDDYHRDFIADMMGEVKLTKLAEFYDVYLKFRKNPKDDGLQKQLKDLQAVLRKEIVKPIGNGGKYKAGYDRLFGAKLFKDGKELGDLAKFVIAQEGESSPKLAHLAHFEKFSTYFTGFHRNRKNMYSDEDKHTAITYRLIHENLPRFIDNLQILATIKQKHSALYDQIINELTASGLDVSLASHLDGYHKLLTQEGITAYNTLLGGISGEAGSRKIQGINELINSHHNQHCHKSERIAKLRPLHKQILSDGMGVSFLPSKFADDSEMCQAVNEFYRHYADVFAKVQSLFDGFDDHQKDGIYVEHKNLNELSKQAFGDFALLGRVLDGYYVDVVNPEFNERFAKAKTDNAKAKLTKEKDKFIKGVHSLASLEQAIEHYTARHDDESVQAGKLGQYFKHGLAGVDNPIQKIHNNHSTIKGFLERERPAGERALPKIKSGKNPEMTQLRQLKELLDNALNVAHFAKLLTTKTTLDNQDGNFYGEFGALYDELAKIPTLYNKVRDYLSQKPFSTEKYKLNFGNPTLLNGWDLNKEKDNFGIILQKDGCYYLALLDKAHKKVFDNAPNTGKNVYQKMIYKLLPGPNKMLPKVFFAKSNLDYYNPSAELLDKYAQGTHKKGNNFNLKDCHALIDFFKAGINKHPEWQHFGFKFSPTSSYQDLSDFYREVEPQGYQVKFVDINADYINELVEQGQLYLFQIYNKDFSPKAHGKPNLHTLYFKALFSKDNLANPIYKLNGEAQIFYRKASLDMNETTIHRAGEVLENKNPDNPKKRQFVYDIIKDKRYTQDKFMLHVPITMNFGVQGMTIKEFNKKVNQSIQQYDEVNVIGIDRGESHLLYLTVINSKGEILEQRSLNDITTASANGTQMTTPYHKILDKREIERLNARVGWGEIETIKELKSGYLSHVVHQISQLMLKYNAIVVLEDLNFGFKRGRFKVEKQIYQNFENALIKKLNHLVLKDEADDEIGSYKNALQLTNNFTDLKSIGKQTGFLFYVPAWNTSKIDPETGFVDLLKPRYENIAQSQAFFGKFDKICYNADKDYFEFHIDYAKFTDKAKNSRQIWKICSHGDKRYVYDKTANQNKGATKGINVNDELKSLFARHHINDKQPNLVMDICQNNDKEFHKSLIYLLKTLLALRYSNASSDEDFILSPVANDEGMFFNSALADDTQPQNADANGAYHIALKGLWVLEQIKNSDDLNKVKLAIDNQTWLNFAQNRKRPAATKKAGQAKKKKGSYPYDVPDYAYPYDVPDYAYPYDVPDYAGSPKKKRKVGSGHHHHHHHHHHGSSGGSSGVSGWRLFKKIS

SEQ ID NO: 95 - protein, 1351 aa, Artificial Sequence
  Synthetic sequence
MALFQDFTHLYPLSKTMRFELKPIGKTLEHIHAKNFLSQDETMADMYQKVKAILDDYHRDFIADMMGEVKLTKLAEFYDVYLKFRKNPKDDGLQKQLKDLQAVLRKEIVKPIGNGGKYKAGYDRLFGAKLFKDGKELGDLAKFVIAQEGESSPKLAHLAHFEKFSTYFTGFHRNRKNMYSDEDKHTAITYRLIHENLPRFIDNLQILATIKQKHSALYDQIINELTASGLDVSLASHLDGYHKLLTQEGITAYNTLLGGISGEAGSRKIQGINELINSHHNQHCHKSERIAKLRPLHKQILSDGMGVSFLPSKFADDSEMCQAVNEFYRHYADVFAKVQSLFDGFDDHQKDGIYVEHKNLNELSKQAFGDFALLGRVLDGYYVDVVNPEFNERFAKAKTDNAKAKLTKEKDKFIKGVHSLASLEQAIEHYTARHDDESVQAGKLGQYFKHGLAGVDNPIQKIHNNHSTIKGFLERERPAGERALPKIKSGKNPEMTQLRQLKELLDNALNVAHFAKLLTTKTTLDNQDGNFYGEFGALYDELAKIPTLYNKVRDYLSQKPFSTEKYKLTFGNPTLLNGWDLNKEKDNFGIILQKDGCYYLALLDKAHKKVFDNAPNTGKNVYQKMIYKLLPGPNKMLPKVFFAKSNLDYYNPSAELLDKYAQGTHKKGNNFNLKDCHALIDFFKAGINKHPEWQHFGFKFSPTSSYQDLSDFYREVEPQGYQVKFVDINADYINELVEQGQLYLFQIYNKDFSPKAHGKPNLHTLYFKALFSKDNLANPIYKLNGEAQIFYRKASLDMNETTIHRAGEVLENKNPDNPKKRQFVYDIIKDKRYTQDKFMLHVPITMNFGVQGMTIKEFNKKVNQSIQQYDEVNVIGIDRGERHLLYLTVINSKGEILEQRSLNDITTASANGTQMTTPYHKILDKREIERLNARVGWGEIETIKELKSGYLSHVVHQISQLMLKYNAIVVLEDLNFGFKRGRFKVEKQIYQNFENALIKKLNHLVLKDEADDEIGSYKNALQLTNNFTDLKSIGKQTGFLFYVPAWNTSKIDPETGFVDLLKPRYENIAQSQAFFGKFDKICYNADKDYFEFHIDYAKFTDKAKNSRQIWKICSHGDKRYVYDKTANQNKGATKGINVNDELKSLFARHHINDKQPNLVMDICQNNDKEFHKSLIYLLKTLLALRYSNASSDEDFILSPVANDEGMFFNSALADDTQPQNADANGAYHIALKGLWVLEQIKNSDDLNKVKLAIDNQTWLNFAQNRKRPAATKKAGQAKKKKGSYPYDVPDYAYPYDVPDYAYPYDVPDYAGSPKKKRKVGSGHHHHHHHHHHGSSGGSSGVSGWRLFKKIS

SEQ ID NO: 96 - protein, 1351 aa, Artificial Sequence
  Synthetic sequence
MALFQDFTHLYPLSKTMRFELKPIGKTLEHIHAKNFLSQDETMADMYQKVKAILDDYHRDFIADMMGEVKLTKLAEFYDVYLKFRKNPKDDGLQKQLKDLQAVLRKEIVKPIGNGGKYKAGYDRLFGAKLFKDGKELGDLAKFVIAQEGESSPKLAHLAHFEKFSTYFTGFHRNRKNMYSDEDKHTAITYRLIHENLPRFIDNLQILATIKQKHSALYDQIINELTASGLDVSLASHLDGYHKLLTQEGITAYNTLLGGISGEAGSRKIQGINELINSHHNQHCHKSERIAKLRPLHKQILSDGMGVSFLPSKFADDSEMCQAVNEFYRHYADVFAKVQSLFDGFDDHQKDGIYVEHKNLNELSKQAFGDFALLGRVLDGYYVDVVNPEFNERFAKAKTDNAKAKLTKEKDKFIKGVHSLASLEQAIEHYTARHDDESVQAGKLGQYFKHGLAGVDNPIQKIHNNHSTIKGFLERERPAGERALPKIKSGKNPEMTQLRQLKELLDNALNVAHFAKLLTTKTTLDNQDGNFYGEFGALYDELAKIPTLYNKVRDYLSQKPFSTEKYKLNFGNPTLLKGWDLNKEKDNFGIILQKDGCYYLALLDKAHKKVFDNAPNTGKNVYQKMIYKLLPGPNKMLPKVFFAKSNLDYYNPSAELLDKYAQGTHKKGNNFNLKDCHALIDFFKAGINKHPEWQHFGFKFSPTSSYQDLSDFYREVEPQGYQVKFVDINADYINELVEQGQLYLFQIYNKDFSPKAHGKPNLHTLYFKALFSKDNLANPIYKLNGEAQIFYRKASLDMNETTIHRAGEVLENKNPDNPKKRQFVYDIIKDKRYTQDKFMLHVPITMNFGVQGMTIKEFNKKVNQSIQQYDEVNVIGIDRGERHLLYLTVINSKGEILEQRSLNDITTASANGTQMTTPYHKILDKREIERLNARVGWGEIETIKELKSGYLSHVVHQISQLMLKYNAIVVLEDLNFGFKRGRFKVEKQIYQNFENALIKKLNHLVLKDEADDEIGSYKNALQLTNNFTDLKSIGKQTGFLFYVPAWNTSKIDPETGFVDLLKPRYENIAQSQAFFGKFDKICYNADKDYFEFHIDYAKFTDKAKNSRQIWKICSHGDKRYVYDKTANQNKGATKGINVNDELKSLFARHHINDKQPNLVMDICQNNDKEFHKSLIYLLKTLLALRYSNASSDEDFILSPVANDEGMFFNSALADDTQPQNADANGAYHIALKGLWVLEQIKNSDDLNKVKLAIDNQTWLNFAQNRKRPAATKKAGQAKKKKGSYPYDVPDYAYPYDVPDYAYPYDVPDYAGSPKKKRKVGSGHHHHHHHHHHGSSGGSSGVSGWRLFKKIS

SEQ ID NO: 97 - protein, 1351 aa, Artificial Sequence
  Synthetic sequence
MALFQDFTHLYPLSKTMRFELKPIGKTLEHIHAKNFLSQDETMADMYQKVKAILDDYHRDFIADMMGEVKLTKLAEFYDVYLKFRKNPKDDGLQKQLKDLQAVLRKEIVKPIGNGGKYKAGYDRLFGAKLFKDGKELGDLAKFVIAQEGESSPKLAHLAHFEKFSTYFTGFHRNRKNMYSDEDKHTAITYRLIHENLPRFIDNLQILATIKQKHSALYDQIINELTASGLDVSLASHLDGYHKLLTQEGITAYNTLLGGISGEAGSRKIQGINELINSHHNQHCHKSERIAKLRPLHKQILSDGMGVSFLPSKFADDSEMCQAVNEFYRHYADVFAKVQSLFDGFDDHQKDGIYVEHKNLNELSKQAFGDFALLGRVLDGYYVDVVNPEFNERFAKAKTDNAKAKLTKEKDKFIKGVHSLASLEQAIEHYTARHDDESVQAGKLGQYFKHGLAGVDNPIQKIHNNHSTIKGFLERERPAGERALPKIKSGKNPEMTQLRQLKELLDNALNVAHFAKLLTTKTTLDNQDGNFYGEFGALYDELAKIPTLYNKVRDYLLQKPFSTEKYKLNFGNPTLLNGWDLNKEKDNFGIILQKDGCYYLALLDKAHKKVFDNAPNTGKNVYQKMIYKLLPGPNKMLPKVFFAKSNLDYYNPSAELLDKYAQGTHKKGNNFNLKDCHALIDFFKAGINKHPEWQHFGFKFSPTSSYQDLSDFYREVEPQGYQVKFVDINADYINELVEQGQLYLFQIYNKDFSPKAHGKPNLHTLYFKALFSKDNLANPIYKLNGEAQIFYRKASLDMNETTIHRAGEVLENKNPDNPKKRQFVYDIIKDKRYTQDKFMLHVPITMNFGVQGMTIKEFNKKVNQSIQQYDEVNVIGIDRGERHLLYLTVINSKGEILEQRSLNDITTASANGTQMTTPYHKILDKREIERLNARVGWGEIETIKELKSGYLSHVVHQISQLMLKYNAIVVLEDLNFGFKRGRFKVEKQIYQNFENALIKKLNHLVLKDEADDEIGSYKNALQLTNNFTDLKSIGKQTGFLFYVPAWNTSKIDPETGFVDLLKPRYENIAQSQAFFGKFDKICYNADKDYFEFHIDYAKFTDKAKNSRQIWKICSHGDKRYVYDKTANQNKGATKGINVNDELKSLFARHHINDKQPNLVMDICQNNDKEFHKSLIYLLKTLLALRYSNASSDEDFILSPVANDEGMFFNSALADDTQPQNADANGAYHIALKGLWVLEQIKNSDDLNKVKLAIDNQTWLNFAQNRKRPAATKKAGQAKKKKGSYPYDVPDYAYPYDVPDYAYPYDVPDYAGSPKKKRKVGSGHHHHHHHHHHGSSGGSSGVSGWRLFKKIS

SEQ ID NO: 98 - protein, 1351 aa, Artificial Sequence
  Synthetic sequence
MALFQDFTHLYPLSKTMRFELKPIGKTLEHIHAKNFLSQDETMADMYQKVKAILDDYHRDFIADMMGEVKLTKLAEFYDVYLKFRKNPKDDGLQKQLKDLQAVLRKEIVKPIGNGGKYKAGYDRLFGAKLFKDGKELGDLAKFVIAQEGESSPKLAHLAHFEKFSTYFTGFHRNRKNMYSDEDKHTAITYRLIHENLPRFIDNLQILATIKQKHSALYDQIINELTASGLDVSLASHLDGYHKLLTQEGITAYNTLLGGISGEAGSRKIQGINELINSHHNQHCHKSERIAKLRPLHKQILSDGMGVSFLPSKFADDSEMCQAVNEFYRHYADVFAKVQSLFDGFDDHQKDGIYVEHKNLNELSKQAFGDFALLGRVLDGYYVDVVNPEFNERFAKAKTDNAKAKLTKEKDKFIKGVHSLASLEQAIEHYTARHDDESVQAGKLGQYFKHGLAGVDNPIQKIHNNHSTIKGFLERERPAGERALPKIKSGKNPEMTQLRQLKELLDNALNVAHFAKLLTTKTTLDNQDGNFYGEFGALYDELAKIPTLYNKVRDYLSQKPFSTEKYKLNFGNPTLLNGWDLNKEKDNFGIILQKDGCYYLALLDKAHKKVFDNAPNTGKNVYQKMIYKLLPGPNKMLPKVFFAKSNLDYYNPSAELLDKYAQGTHKKGNNFNLKDCHALIDFFKAGINKHPEWQHFGFKFSPTSSYQDLSDFYREVEPQGYQVKFVDINADYINELVEQGQLYLFQIYNKDFSPKAHGKPNLHTLYFKALFSKDNLANPIYKLNGEAQIFYRKASLDMNETTIHRAGEVLENKNPDNPKKRQFVYDIIKDKRYTQDKFMLHVPITMNFGVQGMTIKEFNKKVNQSIQQYDEVNVIAIDRGERHLLYLTVINSKGEILEQRSLNDITTASANGTQMTTPYHKILDKREIERLNARVGWGEIETIKELKSGYLSHVVHQISQLMLKYNAIVVLEDLNFGFKRGRFKVEKQIYQNFENALIKKLNHLVLKDEADDEIGSYKNALQLTNNFTDLKSIGKQTGFLFYVPAWNTSKIDPETGFVDLLKPRYENIAQSQAFFGKFDKICYNADKDYFEFHIDYAKFTDKAKNSRQIWKICSHGDKRYVYDKTANQNKGATKGINVNDELKSLFARHHINDKQPNLVMDICQNNDKEFHKSLIYLLKTLLALRYSNASSDEDFILSPVANDEGMFFNSALADDTQPQNADANGAYHIALKGLWVLEQIKNSDDLNKVKLAIDNQTWLNFAQNRKRPAATKKAGQAKKKKGSYPYDVPDYAYPYDVPDYAYPYDVPDYAGSPKKKRKVGSGHHHHHHHHHHGSSGGSSGVSGWRLFKKIS

SEQ ID NO: 99 - protein, 1351 aa, Artificial Sequence
  Synthetic sequence
MALFQDFTHLYPLSKTMRFELKPIGKTLEHIHAKNFLSQDETMADMYQKVKAILDDYHRDFIADMMGEVKLTKLAEFYDVYLKFRKNPKDDGLQKQLKDLQAVLRKEIVKPIGNGGKYKAGYDRLFGAKLFKDGKELGDLAKFVIAQEGESSPKLAHLAHFEKFSTYFTGFHRNRKNMYSDEDKHTAITYRLIHENLPRFIDNLQILATIKQKHSALYDQIINELTASGLDVSLASHLDGYHKLLTQEGITAYNTLLGGISGEAGSRKIQGINELINSHHNQHCHKSERIAKLRPLHKQILSDGMGVSFLPSKFADDSEMCQAVNEFYRHYADVFAKVQSLFDGFDDHQKDGIYVEHKNLNELSKQAFGDFALLGRVLDGYYVDVVNPEFNERFAKAKTDNAKAKLTKEKDKFIKGVHSLASLEQAIEHYTARHDDESVQAGKLGQYFKHGLAGVDNPIQKIHNNHSTIKGFLERERPAGERALPKIKSGKNPEMTQLRQLKELLDNALNVAHFAKLLTTKTTLDNQDGNFYGEFGALYDELAKIPTLYNKVRDYLSQKPFSTEKYKLNFGNPTLLNGWDLNKEKDNFGIILQKDGCYYLALLDKAHKKVFDNAPNTGKNVYQKMIYKLLPGPNKMLPKVFFAKSNLDYYNPSAELLDKYAQGTHKKGNNFNLKDCHALIDFFKAGINKHPEWQHFGFKFSPTSSYQDLSDFYREVEPQGYQVKFVDINADYINELVEQGQLYLFQIYNKDFSPKAHGKPNLHTLYFKALFSKDNLANPIYKLNGEAQIFYRKASLDMNETTIHRAGEVLENKNPDNPKKRQFVYDIIKDKRYTQDKFMLHVPITMNFGVQGMTIKEFNKKVNQSIQQYDEVNVIGADRGERHLLYLTVINSKGEILEQRSLNDITTASANGTQMTTPYHKILDKREIERLNARVGWGEIETIKELKSGYLSHVVHQISQLMLKYNAIVVLEDLNFGFKRGRFKVEKQIYQNFENALIKKLNHLVLKDEADDEIGSYKNALQLTNNFTDLKSIGKQTGFLFYVPAWNTSKIDPETGFVDLLKPRYENIAQSQAFFGKFDKICYNADKDYFEFHIDYAKFTDKAKNSRQIWKICSHGDKRYVYDKTANQNKGATKGINVNDELKSLFARHHINDKQPNLVMDICQNNDKEFHKSLIYLLKTLLALRYSNASSDEDFILSPVANDEGMFFNSALADDTQPQNADANGAYHIALKGLWVLEQIKNSDDLNKVKLAIDNQTWLNFAQNRKRPAATKKAGQAKKKKGSYPYDVPDYAYPYDVPDYAYPYDVPDYAGSPKKKRKVGSGHHHHHHHHHHGSSGGSSGVSGWRLFKKIS

SEQ ID NO: 100 - protein, 1351 aa, Artificial Sequence
  Synthetic sequence
MALFQDFTHLYPLSKTMRFELKPIGKTLEHIHAKNFLSQDETMADMYQKVKAILDDYHRDFIADMMGEVKLTKLAEFYDVYLKFRKNPKDDGLQKQLKDLQAVLRKEIVKPIGNGGKYKAGYDRLFGAKLFKDGKELGDLAKFVIAQEGESSPKLAHLAHFEKFSTYFTGFHRNRKNMYSDEDKHTAITYRLIHENLPRFIDNLQILATIKQKHSALYDQIINELTASGLDVSLASHLDGYHKLLTQEGITAYNTLLGGISGEAGSRKIQGINELINSHHNQHCHKSERIAKLRPLHKQILSDGMGVSFLPSKFADDSEMCQAVNEFYRHYADVFAKVQSLFDGFDDHQKDGIYVEHKNLNELSKQAFGDFALLGRVLDGYYVDVVNPEFNERFAKAKTDNAKAKLTKEKDKFIKGVHSLASLEQAIEHYTARHDDESVQAGKLGQYFKHGLAGVDNPIQKIHNNHSTIKGFLERERPAGERALPKIKSGKNPEMTQLRQLKELLDNALNVAHFAKLLTTKTTLDNQDGNFYGEFGALYDELAKIPTLYRKVRDYLSQKPFSTEKYKLNFGNPTLLNGWDLNKEKDNFGIILQKDGCYYLALLDKAHKKVFDNAPNTGKNVYQKMIYKLLPGPNKMLPKVFFAKSNLDYYNPSAELLDKYAQGTHKKGNNFNLKDCHALIDFFKAGINKHPEWQHFGFKFSPTSSYQDLSDFYREVEPQGYQVKFVDINADYINELVEQGQLYLFQIYNKDFSPKAHGKPNLHTLYFKALFSKDNLANPIYKLNGEAQIFYRKASLDMNETTIHRAGEVLENKNPDNPKKRQFVYDIIKDKRYTQDKFMLHVPITMNFGVQGMTIKEFNKKVNQSIQQYDEVNVIGIDRGERHLLYLTVINSKGEILEQRSLNDITTASANGTQMTTPYHKILDKREIERLNARVGWGEIETIKELKSGYLSHVVHQISQLMLKYNAIVVLEDLNFGFKRGRFKVEKQIYQNFENALIKKLNHLVLKDEADDEIGSYKNALQLTNNFTDLKSIGKQTGFLFYVPAWNTSKIDPETGFVDLLKPRYENIAQSQAFFGKFDKICYNADKDYFEFHIDYAKFTDKAKNSRQIWKICSHGDKRYVYDKTANQNKGATKGINVNDELKSLFARHHINDKQPNLVMDICQNNDKEFHKSLIYLLKTLLALRYSNASSDEDFILSPVANDEGMFFNSALADDTQPQNADANGAYHIALKGLWVLEQIKNSDDLNKVKLAIDNQTWLNFAQNRKRPAATKKAGQAKKKKGSYPYDVPDYAYPYDVPDYAYPYDVPDYAGSPKKKRKVGSGHHHHHHHHHHGSSGGSSGVSGWRLFKKIS

SEQ ID NO: 101 - protein, 1351 aa, Artificial Sequence
  Synthetic sequence
MALFQDFTHLYPLSKTMRFELKPIGKTLEHIHAKNFLSQDETMADMYQKVKAILDDYHRDFIADMMGEVKLTKLAEFYDVYLKFRKNPKDDGLQKQLKDLQAVLRKEIVKPIGNGGKYKAGYDRLFGAKLFKDGKELGDLAKFVIAQEGESSPKLAHLAHFEKFSTYFTGFHRNRKNMYSDEDKHTAITYRLIHENLPRFIDNLQILATIKQKHSALYDQIINELTASGLDVSLASHLDGYHKLLTQEGITAYNTLLGGISGEAGSRKIQGINELINSHHNQHCHKSERIAKLRPLHKQILSDGMGVSFLPSKFADDSEMCQAVNEFYRHYADVFAKVQSLFDGFDDHQKDGIYVEHKNLNELSKQAFGDFALLGRVLDGYYVDVVNPEFNERFAKAKTDNAKAKLTKEKDKFIKGVHSLASLEQAIEHYTARHDDESVQAGKLGQYFKHGLAGVDNPIQKIHNNHSTIKGFLERERPAGERALPKIKSGKNPEMTQLRQLKELLDNALNVAHFAKLLTTKTTLDNQDGNFYGEFGALYDELAKIPTLYNKVKDYLSQKPFSTEKYKLNFGNPTLLNGWDLNKEKDNFGIILQKDGCYYLALLDKAHKKVFDNAPNTGKNVYQKMIYKLLPGPNKMLPKVFFAKSNLDYYNPSAELLDKYAQGTHKKGNNFNLKDCHALIDFFKAGINKHPEWQHFGFKFSPTSSYQDLSDFYREVEPQGYQVKFVDINADYINELVEQGQLYLFQIYNKDFSPKAHGKPNLHTLYFKALFSKDNLANPIYKLNGEAQIFYRKASLDMNETTIHRAGEVLENKNPDNPKKRQFVYDIIKDKRYTQDKFMLHVPITMNFGVQGMTIKEFNKKVNQSIQQYDEVNVIGIDRGERHLLYLTVINSKGEILEQRSLNDITTASANGTQMTTPYHKILDKREIERLNARVGWGEIETIKELKSGYLSHVVHQISQLMLKYNAIVVLEDLNFGFKRGRFKVEKQIYQNFENALIKKLNHLVLKDEADDEIGSYKNALQLTNNFTDLKSIGKQTGFLFYVPAWNTSKIDPETGFVDLLKPRYENIAQSQAFFGKFDKICYNADKDYFEFHIDYAKFTDKAKNSRQIWKICSHGDKRYVYDKTANQNKGATKGINVNDELKSLFARHHINDKQPNLVMDICQNNDKEFHKSLIYLLKTLLALRYSNASSDEDFILSPVANDEGMFFNSALADDTQPQNADANGAYHIALKGLWVLEQIKNSDDLNKVKLAIDNQTWLNFAQNRKRPAATKKAGQAKKKKGSYPYDVPDYAYPYDVPDYAYPYDVPDYAGSPKKKRKVGSGHHHHHHHHHHGSSGGSSGVSGWRLFKKIS

SEQ ID NO: 102 - protein, 1351 aa, Artificial Sequence
  Synthetic sequence
MALFQDFTHLYPLSKTMRFELKPIGKTLEHIHAKNFLSQDETMADMYQKVKAILDDYHRDFIADMMGEVKLTKLAEFYDVYLKFRKNPKDDGLQKQLKDLQAVLRKEIVKPIGNGGKYKAGYDRLFGAKLFKDGKELGDLAKFVIAQEGESSPKLAHLAHFEKFSTYFTGFHRNRKNMYSDEDKHTAITYRLIHENLPRFIDNLQILATIKQKHSALYDQIINELTASGLDVSLASHLDGYHKLLTQEGITAYNTLLGGISGEAGSRKIQGINELINSHHNQHCHKSERIAKLRPLHKQILSDGMGVSFLPSKFADDSEMCQAVNEFYRHYADVFAKVQSLFDGFDDHQKDGIYVEHKNLNELSKQAFGDFALLGRVLDGYYVDVVNPEFNERFAKAKTDNAKAKLTKEKDKFIKGVHSLASLEQAIEHYTARHDDESVQAGKLGQYFKHGLAGVDNPIQKIHNNHSTIKGFLERERPAGERALPKIKSGKNPEMTQLRQLKELLDNALNVAHFAKLLTTKTTLDNQDGNFYGEFGALYDELAKIPTLYNKVRDYLSQKPFSTEKYKLMFGNPTLLNGWDLNKEKDNFGIILQKDGCYYLALLDKAHKKVFDNAPNTGKNVYQKMIYKLLPGPNKMLPKVFFAKSNLDYYNPSAELLDKYAQGTHKKGNNFNLKDCHALIDFFKAGINKHPEWQHFGFKFSPTSSYQDLSDFYREVEPQGYQVKFVDINADYINELVEQGQLYLFQIYNKDFSPKAHGKPNLHTLYFKALFSKDNLANPIYKLNGEAQIFYRKASLDMNETTIHRAGEVLENKNPDNPKKRQFVYDIIKDKRYTQDKFMLHVPITMNFGVQGMTIKEFNKKVNQSIQQYDEVNVIGIDRGERHLLYLTVINSKGEILEQRSLNDITTASANGTQMTTPYHKILDKREIERLNARVGWGEIETIKELKSGYLSHVVHQISQLMLKYNAIVVLEDLNFGFKRGRFKVEKQIYQNFENALIKKLNHLVLKDEADDEIGSYKNALQLTNNFTDLKSIGKQTGFLFYVPAWNTSKIDPETGFVDLLKPRYENIAQSQAFFGKFDKICYNADKDYFEFHIDYAKFTDKAKNSRQIWKICSHGDKRYVYDKTANQNKGATKGINVNDELKSLFARHHINDKQPNLVMDICQNNDKEFHKSLIYLLKTLLALRYSNASSDEDFILSPVANDEGMFFNSALADDTQPQNADANGAYHIALKGLWVLEQIKNSDDLNKVKLAIDNQTWLNFAQNRKRPAATKKAGQAKKKKGSYPYDVPDYAYPYDVPDYAYPYDVPDYAGSPKKKRKVGSGHHHHHHHHHHGSSGGSSGVSGWRLFKKIS

SEQ ID NO: 103 - protein, 1351 aa, Artificial Sequence
  Synthetic sequence
MALFQDFTHLYPLSKTMRFELKPIGKTLEHIHAKNFLSQDETMADMYQKVKAILDDYHRDFIADMMGEVKLTKLAEFYDVYLKFRKNPKDDGLQKQLKDLQAVLRKEIVKPIGNGGKYKAGYDRLFGAKLFKDGKELGDLAKFVIAQEGESSPKLAHLAHFEKFSTYFTGFHRNRKNMYSDEDKHTAITYRLIHENLPRFIDNLQILATIKQKHSALYDQIINELTASGLDVSLASHLDGYHKLLTQEGITAYNTLLGGISGEAGSRKIQGINELINSHHNQHCHKSERIAKLRPLHKQILSDGMGVSFLPSKFADDSEMCQAVNEFYRHYADVFAKVQSLFDGFDDHQKDGIYVEHKNLNELSKQAFGDFALLGRVLDGYYVDVVNPEFNERFAKAKTDNAKAKLTKEKDKFIKGVHSLASLEQAIEHYTARHDDESVQAGKLGQYFKHGLAGVDNPIQKIHNNHSTIKGFLERERPAGERALPKIKSGKNPEMTQLRQLKELLDNALNVAHFAKLLTTKTTLDNQDGNFYGEFGALYDELAKIPTLYNKVRDYLSQKPFSTEKYKLNFGNPTLLNGWDLNKEKDNFGIILQKDGCYYLALLDKAHKKVFDNAPNTGKNVYQKMIYKLLPGPNKMLPKVFFAKSNLDYYNPSAELLDKYAQGTHKKGNNFNLKDCHALIDFFKAGINKHPEWQHFGFKFSPTSSYQDLSDFYREVEPQGYQVKFVDINADYINELVEQGQLYLFQIYNKDFSPKAHGKPNLHTLYFKALFSKDNLANPIYKLNGEAQIFYRKASLDMNETTIHRAGEVLENKNPDNPKKRQFVYDIIKDKRYTQDKFMLHVPITMNFGVQGMTIKEFNKKVNQSIQQYDEVNVIGIARGERHLLYLTVINSKGEILEQRSLNDITTASANGTQMTTPYHKILDKREIERLNARVGWGEIETIKELKSGYLSHVVHQISQLMLKYNAIVVLADLNFGFKRGRFKVEKQIYQNFENALIKKLNHLVLKDEADDEIGSYKNALQLTNNFTDLKSIGKQTGFLFYVPAWNTSKIDPETGFVDLLKPRYENIAQSQAFFGKFDKICYNADKDYFEFHIDYAKFTDKAKNSRQIWKICSHGDKRYVYDKTANQNKGATKGINVNDELKSLFARHHINDKQPNLVMDICQNNDKEFHKSLIYLLKTLLALRYSNASSDEDFILSPVANDEGMFFNSALADDTQPQNADANGAYHIALKGLWVLEQIKNSDDLNKVKLAIDNQTWLNFAQNRKRPAATKKAGQAKKKKGSYPYDVPDYAYPYDVPDYAYPYDVPDYAGSPKKKRKVGSGHHHHHHHHHHGSSGGSSGVSGWRLFKKIS

SEQ ID NO: 104 - protein, 1319 aa, Artificial Sequence
  Synthetic sequence
MALFQDFTHLYPLSKTMRFELKPIGKTLEHIHAKNFLSQDETMADMYQKVKAILDDYHRDFIADMMGEVKLTKLAEFYDVYLKFRKNPKDDGLQKQLKDLQAVLRKEIVKPIGNGGKYKAGYDRLFGAKLFKDGKELGDLAKFVIAQEGESSPKLAHLAHFEKFSTYFTGFHDNRKNMYSDEDKHTAITYRLIHENLPRFIDNLQILATIKQKHSALYDQIINELTASGLDVSLASHLDGYHKLLTQEGITAYNTLLGGISGEAGSRKIQGINELINSHHNQHCHKSERIAKLRPLHKQILSDGMGVSFLPSKFADDSEMCQAVNEFYRHYADVFAKVQSLFDGFDDHQKDGIYVEHKNLNELSKQAFGDFALLGRVLDGYYVDVVNPEFNERFAKAKTDNAKAKLTKEKDKFIKGVHSLASLEQAIEHYTARHDDESVQAGKLGQYFKHGLAGVDNPIQKIHNNHSTIKGFLERERPAGERALPKIKSGKNPEMTQLRQLKELLDNALNVAHFAKLLTTKTTLDNQDGNFYGEFGALYDELAKIPTLYNKVRDYLSQKPFSTEKYKLNFGNPTLLNGWDLNKEKDNFGIILQKDGCYYLALLDKAHKKVFDNAPNTGKNVYQKMIYKLLPGPNKMLPKVFFAKSNLDYYNPSAELLDKYAQGTHKKGNNFNLKDCHALIDFFKAGINKHPEWQHFGFKFSPTSSYQDLSDFYREVEPQGYQVKFVDINADYINELVEQGQLYLFQIYNKDFSPKAHGKPNLHTLYFKALFSKDNLANPIYKLNGEAQIFYRKASLDMNETTIHRAGEVLENKNPDNPKKRQFVYDIIKDKRYTQDKFMLHVPITMNFGVQGMTIKEFNKKVNQSIQQYDEVNVIGIDRGERHLLYLTVINSKGEILEQRSLNDITTASANGTQMTTPYHKILDKREIERLNARVGWGEIETIKELKSGYLSHVVHQISQLMLKYNAIVVLEDLNFGFKRGRFKVEKQIYQNFENALIKKLNHLVLKDEADDEIGSYKNALQLTNNFTDLKSIGKQTGFLFYVPAWNTSKIDPETGFVDLLKPRYENIAQSQAFFGKFDKICYNADKDYFEFHIDYAKFTDKAKNSRQIWKICSHGDKRYVYDKTANQNKGATKGINVNDELKSLFARHHINDKQPNLVMDICQNNDKEFHKSLIYLLKTLLALRYSNASSDEDFILSPVANDEGMFFNSALADDTQPQNADANGAYHIALKGLWVLEQIKNSDDLNKVKLAIDNQTWLNFAQNRKRPAATKKAGQAKKKKGSYPYDVPDYAYPYDVPDYAYPYDVPDYAGSPKKKRKV

SEQ ID NO: 105 - protein, 1319 aa, Artificial Sequence
  Synthetic sequence
MALFQDFTHLYPLSKTMRFELKPIGKTLEHIHAKNFLSQDETMADMYQKVKAILDDYHRDFIADMMGEVKLTKLAEFYDVYLKFRKNPKDDGLQKQLKDLQAVLRKEIVKPIGNGGKYKAGYDRLFGAKLFKDGKELGDLAKFVIAQEGESSPKLAHLAHFEKFSTYFTGFHRNRKNMYSDEDKHTAITYRLIHENLPRFIDNLQILATIKQKHSALYDQIINELTASGLDVSLASHLDGYHKLLTQEGITAYNTLLGGISGEAGSRKIQGINELINSHHNQHCHKSERIAKLRPLHKQILSDGMGVSFLPSKFADDSEMCQAVNEFYRHYADVFAKVQSLFDGFDDHQKDGIYVEHKNLNELSKQAFGDFALLGRVLDGYYVDVVNPEFNERFAKAKTDNAKAKLTKEKDKFIKGVHSLASLEQAIEHYTARHDDESVQAGKLGQYFKHGLAGVDNPIQKIHNNHSTIKGFLERERPAGERALPKIKSGKNPEMTQLRQLKELLDNALNVAHFAKLLTTKTTLDNQDGNFYGEFGALYDELAKIPTLYNKVRDYLSQKPFSTEKYKLNFGNPTLLNGWDLNKEKDNFGIILQKDGCYYLALLDKAHKKVFDNAPNTGKNVYQKMIYKLLPGPNKMLPKVFFAKSNLDYYNPSAELLDKYAQGTHKKGNNFNLKDCHALIDFFKAGINKHPEWQHFGFKFSPTSSYQDLSDFYREVEPQGYQVKFVDINADYINELVEQGQLYLFQIYNKDFSPKAHGKPNLHTLYFKALFSKDNLANPIYKLNGEAQIFYRKASLDMNETTIHRAGEVLENKNPDNPKKRQFVYDIIKDKRYTQDKFMLHVPITMNFGVQGMTIKEFNKKVNQSIQQYDEVNVIGIDRGERHLLYLTVINSKGEILEQRSLNDITTASANGTQMTTPYHKILDKREIERLNARVGWGEIETIKELKSGYLSHVVHQISQLMLKYNAIVVLEDLNFGFKRGRFKVEKQIYQNFENALIKKLNHLVLKDEADDEIGSYKNALQLTNNFTDLKSIGKQTGFLFYVPAWNTSKIDPETGFVDLLKPRYENIAQSQAFFGKFDKICYNADKDYFEFHIDYAKFTDKAKNSRQIWKICSHGDKRYVYDKTANQNKGATKGINVNDELKSLFARHHINDKQPNLVMDICQNNDKEFHKSLIYLLKTLLALRYSNASSDEDFILSPVANDEGMFFNSALADDTQPQNADANGAYHIALKGLWVLEQIKNSDDLNKVKLAIDNQTWLNFAQNRKRPAATKKAGQAKKKKGSYPYDVPDYAYPYDVPDYAYPYDVPDYAGSPKKKRKV

SEQ ID NO: 106 - protein, 1319 aa, Artificial Sequence
  Synthetic sequence
MALFQDFTHLYPLSKTMRFELKPIGKTLEHIHAKNFLSQDETMADMYQKVKAILDDYHRDFIADMMGEVKLTKLAEFYDVYLKFRKNPKDDGLQKQLKDLQAVLRKEIVKPIGNGGKYKAGYDRLFGAKLFKDGKELGDLAKFVIAQEGESSPKLAHLAHFEKFSTYFTRFHDNRKNMYSDEDKHTAITYRLIHENLPRFIDNLQILATIKQKHSALYDQIINELTASGLDVSLASHLDGYHKLLTQEGITAYNTLLGGISGEAGSRKIQGINELINSHHNQHCHKSERIAKLRPLHKQILSDGMGVSFLPSKFADDSEMCQAVNEFYRHYADVFAKVQSLFDGFDDHQKDGIYVEHKNLNELSKQAFGDFALLGRVLDGYYVDVVNPEFNERFAKAKTDNAKAKLTKEKDKFIKGVHSLASLEQAIEHYTARHDDESVQAGKLGQYFKHGLAGVDNPIQKIHNNHSTIKGFLERERPAGERALPKIKSGKNPEMTQLRQLKELLDNALNVAHFAKLLTTKTTLDNQDGNFYGEFGALYDELAKIPTLYNKVRDYLSQKPFSTEKYKLNFGNPTLLNGWDLNKEKDNFGIILQKDGCYYLALLDKAHKKVFDNAPNTGKNVYQKMIYKLLPGPNKMLPKVFFAKSNLDYYNPSAELLDKYAQGTHKKGNNFNLKDCHALIDFFKAGINKHPEWQHFGFKFSPTSSYQDLSDFYREVEPQGYQVKFVDINADYINELVEQGQLYLFQIYNKDFSPKAHGKPNLHTLYFKALFSKDNLANPIYKLNGEAQIFYRKASLDMNETTIHRAGEVLENKNPDNPKKRQFVYDIIKDKRYTQDKFMLHVPITMNFGVQGMTIKEFNKKVNQSIQQYDEVNVIGIDRGERHLLYLTVINSKGEILEQRSLNDITTASANGTQMTTPYHKILDKREIERLNARVGWGEIETIKELKSGYLSHVVHQISQLMLKYNAIVVLEDLNFGFKRGRFKVEKQIYQNFENALIKKLNHLVLKDEADDEIGSYKNALQLTNNFTDLKSIGKQTGFLFYVPAWNTSKIDPETGFVDLLKPRYENIAQSQAFFGKFDKICYNADKDYFEFHIDYAKFTDKAKNSRQIWKICSHGDKRYVYDKTANQNKGATKGINVNDELKSLFARHHINDKQPNLVMDICQNNDKEFHKSLIYLLKTLLALRYSNASSDEDFILSPVANDEGMFFNSALADDTQPQNADANGAYHIALKGLWVLEQIKNSDDLNKVKLAIDNQTWLNFAQNRKRPAATKKAGQAKKKKGSYPYDVPDYAYPYDVPDYAYPYDVPDYAGSPKKKRKV

SEQ ID NO: 107 - protein, 1319 aa, Artificial Sequence
  Synthetic sequence
MALFQDFTHLYPLSKTMRFELKPIGKTLEHIHAKNFLSQDETMADMYQKVKAILDDYHRDFIADMMGEVKLTKLAEFYDVYLKFRKNPKDDGLQKQLKDLQAVLRKEIVKPIGNGGKYKAGYDRLFGAKLFKDGKELGDLAKFVIAQEGESSPKLAHLAHFEKFSTYFTRFHKNRKNMYSDEDKHTAITYRLIHENLPRFIDNLQILATIKQKHSALYDQIINELTASGLDVSLASHLDGYHKLLTQEGITAYNTLLGGISGEAGSRKIQGINELINSHHNQHCHKSERIAKLRPLHKQILSDGMGVSFLPSKFADDSEMCQAVNEFYRHYADVFAKVQSLFDGFDDHQKDGIYVEHKNLNELSKQAFGDFALLGRVLDGYYVDVVNPEFNERFAKAKTDNAKAKLTKEKDKFIKGVHSLASLEQAIEHYTARHDDESVQAGKLGQYFKHGLAGVDNPIQKIHNNHSTIKGFLERERPAGERALPKIKSGKNPEMTQLRQLKELLDNALNVAHFAKLLTTKTTLDNQDGNFYGEFGALYDELAKIPTLYNKVRDYLSQKPFSTEKYKLNFGNPTLLNGWDLNKEKDNFGIILQKDGCYYLALLDKAHKKVFDNAPNTGKNVYQKMIYKLLPGPNKMLPKVFFAKSNLDYYNPSAELLDKYAQGTHKKGNNFNLKDCHALIDFFKAGINKHPEWQHFGFKFSPTSSYQDLSDFYREVEPQGYQVKFVDINADYINELVEQGQLYLFQIYNKDFSPKAHGKPNLHTLYFKALFSKDNLANPIYKLNGEAQIFYRKASLDMNETTIHRAGEVLENKNPDNPKKRQFVYDIIKDKRYTQDKFMLHVPITMNFGVQGMTIKEFNKKVNQSIQQYDEVNVIGIDRGERHLLYLTVINSKGEILEQRSLNDITTASANGTQMTTPYHKILDKREIERLNARVGWGEIETIKELKSGYLSHVVHQISQLMLKYNAIVVLEDLNFGFKRGRFKVEKQIYQNFENALIKKLNHLVLKDEADDEIGSYKNALQLTNNFTDLKSIGKQTGFLFYVPAWNTSKIDPETGFVDLLKPRYENIAQSQAFFGKFDKICYNADKDYFEFHIDYAKFTDKAKNSRQIWKICSHGDKRYVYDKTANQNKGATKGINVNDELKSLFARHHINDKQPNLVMDICQNNDKEFHKSLIYLLKTLLALRYSNASSDEDFILSPVANDEGMFFNSALADDTQPQNADANGAYHIALKGLWVLEQIKNSDDLNKVKLAIDNQTWLNFAQNRKRPAATKKAGQAKKKKGSYPYDVPDYAYPYDVPDYAYPYDVPDYAGSPKKKRKV

SEQ ID NO: 108 - protein, 1319 aa, Artificial Sequence
  Synthetic sequence
MALFQDFTHLYPLSKTMRFELKPIGKTLEHIHAKNFLSQDETMADMYQKVKAILDDYHRDFIADMMGEVKLTKLAEFYDVYLKFRKNPKDDGLQKQLKDLQAVLRKEIVKPIGNGGKYKAGYDRLFGAKLFKDGKELGDLAKFVIAQEGESSPKLAHLAHFEKFSTYFTGFHRNRKRMYSDEDKHTAITYRLIHENLPRFIDNLQILATIKQKHSALYDQIINELTASGLDVSLASHLDGYHKLLTQEGITAYNTLLGGISGEAGSRKIQGINELINSHHNQHCHKSERIAKLRPLHKQILSDGMGVSFLPSKFADDSEMCQAVNEFYRHYADVFAKVQSLFDGFDDHQKDGIYVEHKNLNELSKQAFGDFALLGRVLDGYYVDVVNPEFNERFAKAKTDNAKAKLTKEKDKFIKGVHSLASLEQAIEHYTARHDDESVQAGKLGQYFKHGLAGVDNPIQKIHNNHSTIKGFLERERPAGERALPKIKSGKNPEMTQLRQLKELLDNALNVAHFAKLLTTKTTLDNQDGNFYGEFGALYDELAKIPTLYNKVRDYLSQKPFSTEKYKLNFGNPTLLNGWDLNKEKDNFGIILQKDGCYYLALLDKAHKKVFDNAPNTGKNVYQKMIYKLLPGPNKMLPKVFFAKSNLDYYNPSAELLDKYAQGTHKKGNNFNLKDCHALIDFFKAGINKHPEWQHFGFKFSPTSSYQDLSDFYREVEPQGYQVKFVDINADYINELVEQGQLYLFQIYNKDFSPKAHGKPNLHTLYFKALFSKDNLANPIYKLNGEAQIFYRKASLDMNETTIHRAGEVLENKNPDNPKKRQFVYDIIKDKRYTQDKFMLHVPITMNFGVQGMTIKEFNKKVNQSIQQYDEVNVIGIDRGERHLLYLTVINSKGEILEQRSLNDITTASANGTQMTTPYHKILDKREIERLNARVGWGEIETIKELKSGYLSHVVHQISQLMLKYNAIVVLEDLNFGFKRGRFKVEKQIYQNFENALIKKLNHLVLKDEADDEIGSYKNALQLTNNFTDLKSIGKQTGFLFYVPAWNTSKIDPETGFVDLLKPRYENIAQSQAFFGKFDKICYNADKDYFEFHIDYAKFTDKAKNSRQIWKICSHGDKRYVYDKTANQNKGATKGINVNDELKSLFARHHINDKQPNLVMDICQNNDKEFHKSLIYLLKTLLALRYSNASSDEDFILSPVANDEGMFFNSALADDTQPQNADANGAYHIALKGLWVLEQIKNSDDLNKVKLAIDNQTWLNFAQNRKRPAATKKAGQAKKKKGSYPYDVPDYAYPYDVPDYAYPYDVPDYAGSPKKKRKV

SEQ ID NO: 109 - protein, 1319 aa, Artificial Sequence
  Synthetic sequence
MALFQDFTHLYPLSKTMRFELKPIGKTLEHIHAKNFLSQDETMADMYQKVKAILDDYHRDFIADMMGEVKLTKLAEFYDVYLKFRKNPKDDGLQKQLKDLQAVLRKEIVKPIGNGGKYKAGYDRLFGAKLFKDGKELGDLAKFVIAQEGESSPKLAHLAHFEKFSTYFTRFHRNRKNMYSDEDKHTAITYRLIHENLPRFIDNLQILATIKQKHSALYDQIINELTASGLDVSLASHLDGYHKLLTQEGITAYNTLLGGISGEAGSRKIQGINELINSHHNQHCHKSERIAKLRPLHKQILSDGMGVSFLPSKFADDSEMCQAVNEFYRHYADVFAKVQSLFDGFDDHQKDGIYVEHKNLNELSKQAFGDFALLGRVLDGYYVDVVNPEFNERFAKAKTDNAKAKLTKEKDKFIKGVHSLASLEQAIEHYTARHDDESVQAGKLGQYFKHGLAGVDNPIQKIHNNHSTIKGFLERERPAGERALPKIKSGKNPEMTQLRQLKELLDNALNVAHFAKLLTTKTTLDNQDGNFYGEFGALYDELAKIPTLYNKVRDYLSQKPFSTEKYKLNFGNPTLLNGWDLNKEKDNFGIILQKDGCYYLALLDKAHKKVFDNAPNTGKNVYQKMIYKLLPGPNKMLPKVFFAKSNLDYYNPSAELLDKYAQGTHKKGNNFNLKDCHALIDFFKAGINKHPEWQHFGFKFSPTSSYQDLSDFYREVEPQGYQVKFVDINADYINELVEQGQLYLFQIYNKDFSPKAHGKPNLHTLYFKALFSKDNLANPIYKLNGEAQIFYRKASLDMNETTIHRAGEVLENKNPDNPKKRQFVYDIIKDKRYTQDKFMLHVPITMNFGVQGMTIKEFNKKVNQSIQQYDEVNVIGIDRGERHLLYLTVINSKGEILEQRSLNDITTASANGTQMTTPYHKILDKREIERLNARVGWGEIETIKELKSGYLSHVVHQISQLMLKYNAIVVLEDLNFGFKRGRFKVEKQIYQNFENALIKKLNHLVLKDEADDEIGSYKNALQLTNNFTDLKSIGKQTGFLFYVPAWNTSKIDPETGFVDLLKPRYENIAQSQAFFGKFDKICYNADKDYFEFHIDYAKFTDKAKNSRQIWKICSHGDKRYVYDKTANQNKGATKGINVNDELKSLFARHHINDKQPNLVMDICQNNDKEFHKSLIYLLKTLLALRYSNASSDEDFILSPVANDEGMFFNSALADDTQPQNADANGAYHIALKGLWVLEQIKNSDDLNKVKLAIDNQTWLNFAQNRKRPAATKKAGQAKKKKGSYPYDVPDYAYPYDVPDYAYPYDVPDYAGSPKKKRKV

SEQ ID NO: 110 - protein, 1319 aa, Artificial Sequence
  Synthetic sequence
MALFQDFTHLYPLSKTMRFELKPIGKTLEHIHAKNFLSQDETMADMYQKVKAILDDYHRDFIADMMGEVKLTKLAEFYDVYLKFRKNPKDDGLQKQLKDLQAVLRKEIVKPIGNGGKYKAGYDRLFGAKLFKDGKELGDLAKFVIAQEGESSPKLAHLAHFEKFSTYFTGFHHNRKNMYSDEDKHTAITYRLIHENLPRFIDNLQILATIKQKHSALYDQIINELTASGLDVSLASHLDGYHKLLTQEGITAYNTLLGGISGEAGSRKIQGINELINSHHNQHCHKSERIAKLRPLHKQILSDGMGVSFLPSKFADDSEMCQAVNEFYRHYADVFAKVQSLFDGFDDHQKDGIYVEHKNLNELSKQAFGDFALLGRVLDGYYVDVVNPEFNERFAKAKTDNAKAKLTKEKDKFIKGVHSLASLEQAIEHYTARHDDESVQAGKLGQYFKHGLAGVDNPIQKIHNNHSTIKGFLERERPAGERALPKIKSGKNPEMTQLRQLKELLDNALNVAHFAKLLTTKTTLDNQDGNFYGEFGALYDELAKIPTLYNKVRDYLSQKPFSTEKYKLNFGNPTLLNGWDLNKEKDNFGIILQKDGCYYLALLDKAHKKVFDNAPNTGKNVYQKMIYKLLPGPNKMLPKVFFAKSNLDYYNPSAELLDKYAQGTHKKGNNFNLKDCHALIDFFKAGINKHPEWQHFGFKFSPTSSYQDLSDFYREVEPQGYQVKFVDINADYINELVEQGQLYLFQIYNKDFSPKAHGKPNLHTLYFKALFSKDNLANPIYKLNGEAQIFYRKASLDMNETTIHRAGEVLENKNPDNPKKRQFVYDIIKDKRYTQDKFMLHVPITMNFGVQGMTIKEFNKKVNQSIQQYDEVNVIGIDRGERHLLYLTVINSKGEILEQRSLNDITTASANGTQMTTPYHKILDKREIERLNARVGWGEIETIKELKSGYLSHVVHQISQLMLKYNAIVVLEDLNFGFKRGRFKVEKQIYQNFENALIKKLNHLVLKDEADDEIGSYKNALQLTNNFTDLKSIGKQTGFLFYVPAWNTSKIDPETGFVDLLKPRYENIAQSQAFFGKFDKICYNADKDYFEFHIDYAKFTDKAKNSRQIWKICSHGDKRYVYDKTANQNKGATKGINVNDELKSLFARHHINDKQPNLVMDICQNNDKEFHKSLIYLLKTLLALRYSNASSDEDFILSPVANDEGMFFNSALADDTQPQNADANGAYHIALKGLWVLEQIKNSDDLNKVKLAIDNQTWLNFAQNRKRPAATKKAGQAKKKKGSYPYDVPDYAYPYDVPDYAYPYDVPDYAGSPKKKRKV

SEQ ID NO: 111 - protein, 1319 aa, Artificial Sequence
  Synthetic sequence
MALFQDFTHLYPLSKTMRFELKPIGKTLEHIHAKNFLSQDETMADMYQKVKAILDDYHRDFIADMMGEVKLTKLAEFYDVYLKFRKNPKDDGLQKQLKDLQAVLRKEIVKPIGNGGKYKAGYDRLFGAKLFKDGKELGDLAKFVIAQEGESSPKLAHLAHFEKFSTYFTGFHKNRKNMYSDEDKHTAITYRLIHENLPRFIDNLQILATIKQKHSALYDQIINELTASGLDVSLASHLDGYHKLLTQEGITAYNTLLGGISGEAGSRKIQGINELINSHHNQHCHKSERIAKLRPLHKQILSDGMGVSFLPSKFADDSEMCQAVNEFYRHYADVFAKVQSLFDGFDDHQKDGIYVEHKNLNELSKQAFGDFALLGRVLDGYYVDVVNPEFNERFAKAKTDNAKAKLTKEKDKFIKGVHSLASLEQAIEHYTARHDDESVQAGKLGQYFKHGLAGVDNPIQKIHNNHSTIKGFLERERPAGERALPKIKSGKNPEMTQLRQLKELLDNALNVAHFAKLLTTKTTLDNQDGNFYGEFGALYDELAKIPTLYNKVRDYLSQKPFSTEKYKLNFGNPTLLNGWDLNKEKDNFGIILQKDGCYYLALLDKAHKKVFDNAPNTGKNVYQKMIYKLLPGPNKMLPKVFFAKSNLDYYNPSAELLDKYAQGTHKKGNNFNLKDCHALIDFFKAGINKHPEWQHFGFKFSPTSSYQDLSDFYREVEPQGYQVKFVDINADYINELVEQGQLYLFQIYNKDFSPKAHGKPNLHTLYFKALFSKDNLANPIYKLNGEAQIFYRKASLDMNETTIHRAGEVLENKNPDNPKKRQFVYDIIKDKRYTQDKFMLHVPITMNFGVQGMTIKEFNKKVNQSIQQYDEVNVIGIDRGERHLLYLTVINSKGEILEQRSLNDITTASANGTQMTTPYHKILDKREIERLNARVGWGEIETIKELKSGYLSHVVHQISQLMLKYNAIVVLEDLNFGFKRGRFKVEKQIYQNFENALIKKLNHLVLKDEADDEIGSYKNALQLTNNFTDLKSIGKQTGFLFYVPAWNTSKIDPETGFVDLLKPRYENIAQSQAFFGKFDKICYNADKDYFEFHIDYAKFTDKAKNSRQIWKICSHGDKRYVYDKTANQNKGATKGINVNDELKSLFARHHINDKQPNLVMDICQNNDKEFHKSLIYLLKTLLALRYSNASSDEDFILSPVANDEGMFFNSALADDTQPQNADANGAYHIALKGLWVLEQIKNSDDLNKVKLAIDNQTWLNFAQNRKRPAATKKAGQAKKKKGSYPYDVPDYAYPYDVPDYAYPYDVPDYAGSPKKKRKV

SEQ ID NO: 112 - protein, 1319 aa, Artificial Sequence
  Synthetic sequence
MALFQDFTHLYPLSKTMRFELKPIGKTLEHIHAKNFLSQDETMADMYQKVKAILDDYHRDFIADMMGEVKLTKLAEFYDVYLKFRKNPKDDGLQKQLKDLQAVLRKEIVKPIGNGGKYKAGYDRLFGAKLFKDGKELGDLAKFVIAQEGESSPKLAHLAHFEKFSTYFTGFHANRKNMYSDEDKHTAITYRLIHENLPRFIDNLQILATIKQKHSALYDQIINELTASGLDVSLASHLDGYHKLLTQEGITAYNTLLGGISGEAGSRKIQGINELINSHHNQHCHKSERIAKLRPLHKQILSDGMGVSFLPSKFADDSEMCQAVNEFYRHYADVFAKVQSLFDGFDDHQKDGIYVEHKNLNELSKQAFGDFALLGRVLDGYYVDVVNPEFNERFAKAKTDNAKAKLTKEKDKFIKGVHSLASLEQAIEHYTARHDDESVQAGKLGQYFKHGLAGVDNPIQKIHNNHSTIKGFLERERPAGERALPKIKSGKNPEMTQLRQLKELLDNALNVAHFAKLLTTKTTLDNQDGNFYGEFGALYDELAKIPTLYNKVRDYLSQKPFSTEKYKLNFGNPTLLNGWDLNKEKDNFGIILQKDGCYYLALLDKAHKKVFDNAPNTGKNVYQKMIYKLLPGPNKMLPKVFFAKSNLDYYNPSAELLDKYAQGTHKKGNNFNLKDCHALIDFFKAGINKHPEWQHFGFKFSPTSSYQDLSDFYREVEPQGYQVKFVDINADYINELVEQGQLYLFQIYNKDFSPKAHGKPNLHTLYFKALFSKDNLANPIYKLNGEAQIFYRKASLDMNETTIHRAGEVLENKNPDNPKKRQFVYDIIKDKRYTQDKFMLHVPITMNFGVQGMTIKEFNKKVNQSIQQYDEVNVIGIDRGERHLLYLTVINSKGEILEQRSLNDITTASANGTQMTTPYHKILDKREIERLNARVGWGEIETIKELKSGYLSHVVHQISQLMLKYNAIVVLEDLNFGFKRGRFKVEKQIYQNFENALIKKLNHLVLKDEADDEIGSYKNALQLTNNFTDLKSIGKQTGFLFYVPAWNTSKIDPETGFVDLLKPRYENIAQSQAFFGKFDKICYNADKDYFEFHIDYAKFTDKAKNSRQIWKICSHGDKRYVYDKTANQNKGATKGINVNDELKSLFARHHINDKQPNLVMDICQNNDKEFHKSLIYLLKTLLALRYSNASSDEDFILSPVANDEGMFFNSALADDTQPQNADANGAYHIALKGLWVLEQIKNSDDLNKVKLAIDNQTWLNFAQNRKRPAATKKAGQAKKKKGSYPYDVPDYAYPYDVPDYAYPYDVPDYAGSPKKKRKV

SEQ ID NO: 113 - protein, 1319 aa, Artificial Sequence
  Synthetic sequence
MALFQDFTHLYPLSKTMRFELKPIGKTLEHIHAKNFLSQDETMADMYQKVKAILDDYHRDFIADMMGEVKLTKLAEFYDVYLKFRKNPKDDGLQKQLKDLQAVLRKEIVKPIGNGGKYKAGYDRLFGAKLFKDGKELGDLAKFVIAQEGESSPKLAHLAHFEKFSTYFTGFHDNRKRMYSDEDKHTAITYRLIHENLPRFIDNLQILATIKQKHSALYDQIINELTASGLDVSLASHLDGYHKLLTQEGITAYNTLLGGISGEAGSRKIQGINELINSHHNQHCHKSERIAKLRPLHKQILSDGMGVSFLPSKFADDSEMCQAVNEFYRHYADVFAKVQSLFDGFDDHQKDGIYVEHKNLNELSKQAFGDFALLGRVLDGYYVDVVNPEFNERFAKAKTDNAKAKLTKEKDKFIKGVHSLASLEQAIEHYTARHDDESVQAGKLGQYFKHGLAGVDNPIQKIHNNHSTIKGFLERERPAGERALPKIKSGKNPEMTQLRQLKELLDNALNVAHFAKLLTTKTTLDNQDGNFYGEFGALYDELAKIPTLYNKVRDYLSQKPFSTEKYKLNFGNPTLLNGWDLNKEKDNFGIILQKDGCYYLALLDKAHKKVFDNAPNTGKNVYQKMIYKLLPGPNKMLPKVFFAKSNLDYYNPSAELLDKYAQGTHKKGNNFNLKDCHALIDFFKAGINKHPEWQHFGFKFSPTSSYQDLSDFYREVEPQGYQVKFVDINADYINELVEQGQLYLFQIYNKDFSPKAHGKPNLHTLYFKALFSKDNLANPIYKLNGEAQIFYRKASLDMNETTIHRAGEVLENKNPDNPKKRQFVYDIIKDKRYTQDKFMLHVPITMNFGVQGMTIKEFNKKVNQSIQQYDEVNVIGIDRGERHLLYLTVINSKGEILEQRSLNDITTASANGTQMTTPYHKILDKREIERLNARVGWGEIETIKELKSGYLSHVVHQISQLMLKYNAIVVLEDLNFGFKRGRFKVEKQIYQNFENALIKKLNHLVLKDEADDEIGSYKNALQLTNNFTDLKSIGKQTGFLFYVPAWNTSKIDPETGFVDLLKPRYENIAQSQAFFGKFDKICYNADKDYFEFHIDYAKFTDKAKNSRQIWKICSHGDKRYVYDKTANQNKGATKGINVNDELKSLFARHHINDKQPNLVMDICQNNDKEFHKSLIYLLKTLLALRYSNASSDEDFILSPVANDEGMFFNSALADDTQPQNADANGAYHIALKGLWVLEQIKNSDDLNKVKLAIDNQTWLNFAQNRKRPAATKKAGQAKKKKGSYPYDVPDYAYPYDVPDYAYPYDVPDYAGSPKKKRKV

SEQ ID NO: 114 - protein, 1319 aa, Artificial Sequence
  Synthetic sequence
MALFQDFTHLYPLSKTMRFELKPIGKTLEHIHAKNFLSQDETMADMYQKVKAILDDYHRDFIADMMGEVKLTKLAEFYDVYLKFRKNPKDDGLQKQLKDLQAVLRKEIVKPIGNGGKYKAGYDRLFGAKLFKDGKELGDLAKFVIAQEGESSPKLAHLAHFEKFSTYFTGFHWNRKNMYSDEDKHTAITYRLIHENLPRFIDNLQILATIKQKHSALYDQIINELTASGLDVSLASHLDGYHKLLTQEGITAYNTLLGGISGEAGSRKIQGINELINSHHNQHCHKSERIAKLRPLHKQILSDGMGVSFLPSKFADDSEMCQAVNEFYRHYADVFAKVQSLFDGFDDHQKDGIYVEHKNLNELSKQAFGDFALLGRVLDGYYVDVVNPEFNERFAKAKTDNAKAKLTKEKDKFIKGVHSLASLEQAIEHYTARHDDESVQAGKLGQYFKHGLAGVDNPIQKIHNNHSTIKGFLERERPAGERALPKIKSGKNPEMTQLRQLKELLDNALNVAHFAKLLTTKTTLDNQDGNFYGEFGALYDELAKIPTLYNKVRDYLSQKPFSTEKYKLNFGNPTLLNGWDLNKEKDNFGIILQKDGCYYLALLDKAHKKVFDNAPNTGKNVYQKMIYKLLPGPNKMLPKVFFAKSNLDYYNPSAELLDKYAQGTHKKGNNFNLKDCHALIDFFKAGINKHPEWQHFGFKFSPTSSYQDLSDFYREVEPQGYQVKFVDINADYINELVEQGQLYLFQIYNKDFSPKAHGKPNLHTLYFKALFSKDNLANPIYKLNGEAQIFYRKASLDMNETTIHRAGEVLENKNPDNPKKRQFVYDIIKDKRYTQDKFMLHVPITMNFGVQGMTIKEFNKKVNQSIQQYDEVNVIGIDRGERHLLYLTVINSKGEILEQRSLNDITTASANGTQMTTPYHKILDKREIERLNARVGWGEIETIKELKSGYLSHVVHQISQLMLKYNAIVVLEDLNFGFKRGRFKVEKQIYQNFENALIKKLNHLVLKDEADDEIGSYKNALQLTNNFTDLKSIGKQTGFLFYVPAWNTSKIDPETGFVDLLKPRYENIAQSQAFFGKFDKICYNADKDYFEFHIDYAKFTDKAKNSRQIWKICSHGDKRYVYDKTANQNKGATKGINVNDELKSLFARHHINDKQPNLVMDICQNNDKEFHKSLIYLLKTLLALRYSNASSDEDFILSPVANDEGMFFNSALADDTQPQNADANGAYHIALKGLWVLEQIKNSDDLNKVKLAIDNQTWLNFAQNRKRPAATKKAGQAKKKKGSYPYDVPDYAYPYDVPDYAYPYDVPDYAGSPKKKRKV

SEQ ID NO: 115 - protein, 1319 aa, Artificial Sequence
  Synthetic sequence
MALFQDFTHLYPLSKTMRFELKPIGKTLEHIHAKNFLSQDETMADMYQKVKAILDDYHRDFIADMMGEVKLTKLAEFYDVYLKFRKNPKDDGLQKQLKDLQAVLRKEIVKPIGNGGKYKAGYDRLFGAKLFKDGKELGDLAKFVIAQEGESSPKLAHLAHFEKFSTYFTGFHDNRKNMYSDEDKHTAITYRLIHENLPRFIDNLQILATIKQKHSALYDQIINELTASGLDVSLASHLDGYHKLLTQEGITAYNTLLGGISGEAGSRKIQGINELINSHHNQHCHKSERIAKLRPLHKQILSDGMGVSFLPSKFADDSEMCQAVNEFYRHYADVFAKVQSLFDGFDDHQKDGIYVEHKNLNELSKQAFGDFALLGRVLDGYYVDVVNPEFNERFAKAKTDNAKAKLTKEKDKFIKGVHSLASLEQAIEHYTARHDDESVQAGKLGQYFKHGLAGVDNPIQKIHNNHSTIKGFLERERPAGERALPKIKSGKNPEMTQLRQLKELLDNALNVAHFAKLLTTKTTLDNQDGNFYGEFGALYDELAKIPTLYNKVRDYLSQKPFSTEKYKLNFGRPTLLNGWDLNKEKDNFGIILQKDGCYYLALLDKAHKKVFDNAPNTGKNVYQKMIYKLLPGPNKMLPKVFFAKSNLDYYNPSAELLDKYAQGTHKKGNNFNLKDCHALIDFFKAGINKHPEWQHFGFKFSPTSSYQDLSDFYREVEPQGYQVKFVDINADYINELVEQGQLYLFQIYNKDFSPKAHGKPNLHTLYFKALFSKDNLANPIYKLNGEAQIFYRKASLDMNETTIHRAGEVLENKNPDNPKKRQFVYDIIKDKRYTQDKFMLHVPITMNFGVQGMTIKEFNKKVNQSIQQYDEVNVIGIDRGERHLLYLTVINSKGEILEQRSLNDITTASANGTQMTTPYHKILDKREIERLNARVGWGEIETIKELKSGYLSHVVHQISQLMLKYNAIVVLEDLNFGFKRGRFKVEKQIYQNFENALIKKLNHLVLKDEADDEIGSYKNALQLTNNFTDLKSIGKQTGFLFYVPAWNTSKIDPETGFVDLLKPRYENIAQSQAFFGKFDKICYNADKDYFEFHIDYAKFTDKAKNSRQIWKICSHGDKRYVYDKTANQNKGATKGINVNDELKSLFARHHINDKQPNLVMDICQNNDKEFHKSLIYLLKTLLALRYSNASSDEDFILSPVANDEGMFFNSALADDTQPQNADANGAYHIALKGLWVLEQIKNSDDLNKVKLAIDNQTWLNFAQNRKRPAATKKAGQAKKKKGSYPYDVPDYAYPYDVPDYAYPYDVPDYAGSPKKKRKV

SEQ ID NO: 116 - protein, 1319 aa, Artificial Sequence
  Synthetic sequence
MALFQDFTHLYPLSKTMRFELKPIGKTLEHIHAKNFLSQDETMADMYQKVKAILDDYHRDFIADMMGEVKLTKLAEFYDVYLKFRKNPKDDGLQKQLKDLQAVLRKEIVKPIGNGGKYKAGYDRLFGAKLFKDGKELGDLAKFVIAQEGESSPKLAHLAHFEKFSTYFTGFHDNRKNMYSDEDKHTAITYRLIHENLPRFIDNLQILATIKQKHSALYDQIINELTASGLDVSLASHLDGYHKLLTQEGITAYNTLLGGISGEAGSRKIQGINELINSHHNQHCHKSERIAKLRPLHKQILSDGMGVSFLPSKFADDSEMCQAVNEFYRHYADVFAKVQSLFDGFDDHQKDGIYVEHKNLNELSKQAFGDFALLGRVLDGYYVDVVNPEFNERFAKAKTDNAKAKLTKEKDKFIKGVHSLASLEQAIEHYTARHDDESVQAGKLGQYFKHGLAGVDNPIQKIHNNHSTIKGFLERERPAGERALPKIKSGKNPEMTQLRQLKELLDNALNVAHFAKLLTTKTTLDNQDGNFYGEFGALYDELAKIPTLYNKVRDYLSQKPFSTEKYKLNFGNPTLLNGWDLNKEKDNFGIILQKDGCYYLALLDKAHKKVFDNAPNTGKNVYQKMIYKLLPGPNKMLPKVFFAKSNLDYYNPSAELLDKYAQGTHKKGNNFNLKDCHALIDFFKAGINKHPEWQHFGFKFSPTSSYQDLSDFYREVEPQGYQVKFVDINADYINELVEQGQLYLFQIYNKDFSPKAHGKPNLHTLYFKALFSKDNLANPIYKLNGEAQIFYRKASLDMNETTIHRAGEVLENKNPDNPKKRQFVYDIIKDKRYTQDKFLLHVPITMNFGVQGMTIKEFNKKVNQSIQQYDEVNVIGIDRGERHLLYLTVINSKGEILEQRSLNDITTASANGTQMTTPYHKILDKREIERLNARVGWGEIETIKELKSGYLSHVVHQISQLMLKYNAIVVLEDLNFGFKRGRFKVEKQIYQNFENALIKKLNHLVLKDEADDEIGSYKNALQLTNNFTDLKSIGKQTGFLFYVPAWNTSKIDPETGFVDLLKPRYENIAQSQAFFGKFDKICYNADKDYFEFHIDYAKFTDKAKNSRQIWKICSHGDKRYVYDKTANQNKGATKGINVNDELKSLFARHHINDKQPNLVMDICQNNDKEFHKSLIYLLKTLLALRYSNASSDEDFILSPVANDEGMFFNSALADDTQPQNADANGAYHIALKGLWVLEQIKNSDDLNKVKLAIDNQTWLNFAQNRKRPAATKKAGQAKKKKGSYPYDVPDYAYPYDVPDYAYPYDVPDYAGSPKKKRKV

SEQ ID NO: 117 - protein, 1319 aa, Artificial Sequence
  Synthetic sequence
MALFQDFTHLYPLSKTMRFELKPIGKTLEHIHAKNFLSQDETMADMYQKVKAILDDYHRDFIADMMGEVKLTKLAEFYDVYLKFRKNPKDDGLQKQLKDLQAVLRKEIVKPIGNGGKYKAGYDRLFGAKLFKDGKELGDLAKFVIAQEGESSPKLAHLAHFEKFSTYFTGFHDNRKNMYSDEDKHTAITYRLIHENLPRFIDNLQILATIKQKHSALYDQIINELTASGLDVSLASHLDGYHKLLTQEGITAYNTLLGGISGEAGSRKIQGINELINSHHNQHCHKSERIAKLRPLHKQILSDGMGVSFLPSKFADDSEMCQAVNEFYRHYADVFAKVQSLFDGFDDHQKDGIYVEHKNLNELSKQAFGDFALLGRVLDGYYVDVVNPEFNERFAKAKTDNAKAKLTKEKDKFIKGVHSLASLEQAIEHYTARHDDESVQAGKLGQYFKHGLAGVDNPIQKIHNNHSTIKGFLERERPAGERALPKIKSGKNPEMTQLRQLKELLDNALNVAHFAKLLTTKTTLDNQDGNFYGEFGALYDELAKIPTLYNKVRDYLSQKPFSTEKYKLNFGRPTLLNGWDLNKEKDNFGIILQKDGCYYLALLDKAHKKVFDNAPNTGKNVYQKMIYKLLPGPNKMLPKVFFAKSNLDYYNPSAELLDKYAQGTHKKGNNFNLKDCHALIDFFKAGINKHPEWQHFGFKFSPTSSYQDLSDFYREVEPQGYQVKFVDINADYINELVEQGQLYLFQIYNKDFSPKAHGKPNLHTLYFKALFSKDNLANPIYKLNGEAQIFYRKASLDMNETTIHRAGEVLENKNPDNPKKRQFVYDIIKDKRYTQDKFLLHVPITMNFGVQGMTIKEFNKKVNQSIQQYDEVNVIGIDRGERHLLYLTVINSKGEILEQRSLNDITTASANGTQMTTPYHKILDKREIERLNARVGWGEIETIKELKSGYLSHVVHQISQLMLKYNAIVVLEDLNFGFKRGRFKVEKQIYQNFENALIKKLNHLVLKDEADDEIGSYKNALQLTNNFTDLKSIGKQTGFLFYVPAWNTSKIDPETGFVDLLKPRYENIAQSQAFFGKFDKICYNADKDYFEFHIDYAKFTDKAKNSRQIWKICSHGDKRYVYDKTANQNKGATKGINVNDELKSLFARHHINDKQPNLVMDICQNNDKEFHKSLIYLLKTLLALRYSNASSDEDFILSPVANDEGMFFNSALADDTQPQNADANGAYHIALKGLWVLEQIKNSDDLNKVKLAIDNQTWLNFAQNRKRPAATKKAGQAKKKKGSYPYDVPDYAYPYDVPDYAYPYDVPDYAGSPKKKRKV

SEQ ID NO: 118 - protein, 1319 aa, Artificial Sequence
  Synthetic sequence
MALFQDFTHLYPLSKTMRFELKPIGKTLEHIHAKNFLSQDETMADMYQKVKAILDDYHRDFIADMMGEVKLTKLAEFYDVYLKFRKNPKDDGLQKQLKDLQAVLRKEIVKPIGNGGKYKAGYDRLFGAKLFKDGKELGDLAKFVIAQEGESSPKLAHLAHFEKFSTYFTGFHRNRKNMYSDEDKHTAITYRLIHENLPRFIDNLQILATIKQKHSALYDQIINELTASGLDVSLASHLDGYHKLLTQEGITAYNTLLGGISGEAGSRKIQGINELINSHHNQHCHKSERIAKLRPLHKQILSDGMGVSFLPSKFADDSEMCQAVNEFYRHYADVFAKVQSLFDGFDDHQKDGIYVEHKNLNELSKQAFGDFALLGRVLDGYYVDVVNPEFNERFAKAKTDNAKAKLTKEKDKFIKGVHSLASLEQAIEHYTARHDDESVQAGKLGQYFKHGLAGVDNPIQKIHNNHSTIKGFLERERPAGERALPKIKSGKNPEMTQLRQLKELLDNALNVAHFAKLLTTKTTLDNQDGNFYGEFGALYDELAKIPTLYNKVRDYLSQKPFSTEKYKLNFGRPTLLNGWDLNKEKDNFGIILQKDGCYYLALLDKAHKKVFDNAPNTGKNVYQKMIYKLLPGPNKMLPKVFFAKSNLDYYNPSAELLDKYAQGTHKKGNNFNLKDCHALIDFFKAGINKHPEWQHFGFKFSPTSSYQDLSDFYREVEPQGYQVKFVDINADYINELVEQGQLYLFQIYNKDFSPKAHGKPNLHTLYFKALFSKDNLANPIYKLNGEAQIFYRKASLDMNETTIHRAGEVLENKNPDNPKKRQFVYDIIKDKRYTQDKFMLHVPITMNFGVQGMTIKEFNKKVNQSIQQYDEVNVIGIDRGERHLLYLTVINSKGEILEQRSLNDITTASANGTQMTTPYHKILDKREIERLNARVGWGEIETIKELKSGYLSHVVHQISQLMLKYNAIVVLEDLNFGFKRGRFKVEKQIYQNFENALIKKLNHLVLKDEADDEIGSYKNALQLTNNFTDLKSIGKQTGFLFYVPAWNTSKIDPETGFVDLLKPRYENIAQSQAFFGKFDKICYNADKDYFEFHIDYAKFTDKAKNSRQIWKICSHGDKRYVYDKTANQNKGATKGINVNDELKSLFARHHINDKQPNLVMDICQNNDKEFHKSLIYLLKTLLALRYSNASSDEDFILSPVANDEGMFFNSALADDTQPQNADANGAYHIALKGLWVLEQIKNSDDLNKVKLAIDNQTWLNFAQNRKRPAATKKAGQAKKKKGSYPYDVPDYAYPYDVPDYAYPYDVPDYAGSPKKKRKV

SEQ ID NO: 119 - protein, 1319 aa, Artificial Sequence
  Synthetic sequence
MALFQDFTHLYPLSKTMRFELKPIGKTLEHIHAKNFLSQDETMADMYQKVKAILDDYHRDFIADMMGEVKLTKLAEFYDVYLKFRKNPKDDGLQKQLKDLQAVLRKEIVKPIGNGGKYKAGYDRLFGAKLFKDGKELGDLAKFVIAQEGESSPKLAHLAHFEKFSTYFTGFHRNRKNMYSDEDKHTAITYRLIHENLPRFIDNLQILATIKQKHSALYDQIINELTASGLDVSLASHLDGYHKLLTQEGITAYNTLLGGISGEAGSRKIQGINELINSHHNQHCHKSERIAKLRPLHKQILSDGMGVSFLPSKFADDSEMCQAVNEFYRHYADVFAKVQSLFDGFDDHQKDGIYVEHKNLNELSKQAFGDFALLGRVLDGYYVDVVNPEFNERFAKAKTDNAKAKLTKEKDKFIKGVHSLASLEQAIEHYTARHDDESVQAGKLGQYFKHGLAGVDNPIQKIHNNHSTIKGFLERERPAGERALPKIKSGKNPEMTQLRQLKELLDNALNVAHFAKLLTTKTTLDNQDGNFYGEFGALYDELAKIPTLYNKVRDYLSQKPFSTEKYKLNFGNPTLLNGWDLNKEKDNFGIILQKDGCYYLALLDKAHKKVFDNAPNTGKNVYQKMIYKLLPGPNKMLPKVFFAKSNLDYYNPSAELLDKYAQGTHKKGNNFNLKDCHALIDFFKAGINKHPEWQHFGFKFSPTSSYQDLSDFYREVEPQGYQVKFVDINADYINELVEQGQLYLFQIYNKDFSPKAHGKPNLHTLYFKALFSKDNLANPIYKLNGEAQIFYRKASLDMNETTIHRAGEVLENKNPDNPKKRQFVYDIIKDKRYTQDKFLLHVPITMNFGVQGMTIKEFNKKVNQSIQQYDEVNVIGIDRGERHLLYLTVINSKGEILEQRSLNDITTASANGTQMTTPYHKILDKREIERLNARVGWGEIETIKELKSGYLSHVVHQISQLMLKYNAIVVLEDLNFGFKRGRFKVEKQIYQNFENALIKKLNHLVLKDEADDEIGSYKNALQLTNNFTDLKSIGKQTGFLFYVPAWNTSKIDPETGFVDLLKPRYENIAQSQAFFGKFDKICYNADKDYFEFHIDYAKFTDKAKNSRQIWKICSHGDKRYVYDKTANQNKGATKGINVNDELKSLFARHHINDKQPNLVMDICQNNDKEFHKSLIYLLKTLLALRYSNASSDEDFILSPVANDEGMFFNSALADDTQPQNADANGAYHIALKGLWVLEQIKNSDDLNKVKLAIDNQTWLNFAQNRKRPAATKKAGQAKKKKGSYPYDVPDYAYPYDVPDYAYPYDVPDYAGSPKKKRKV

SEQ ID NO: 120 - protein, 1319 aa, Artificial Sequence
  Synthetic sequence
MALFQDFTHLYPLSKTMRFELKPIGKTLEHIHAKNFLSQDETMADMYQKVKAILDDYHRDFIADMMGEVKLTKLAEFYDVYLKFRKNPKDDGLQKQLKDLQAVLRKEIVKPIGNGGKYKAGYDRLFGAKLFKDGKELGDLAKFVIAQEGESSPKLAHLAHFEKFSTYFTGFHRNRKNMYSDEDKHTAITYRLIHENLPRFIDNLQILATIKQKHSALYDQIINELTASGLDVSLASHLDGYHKLLTQEGITAYNTLLGGISGEAGSRKIQGINELINSHHNQHCHKSERIAKLRPLHKQILSDGMGVSFLPSKFADDSEMCQAVNEFYRHYADVFAKVQSLFDGFDDHQKDGIYVEHKNLNELSKQAFGDFALLGRVLDGYYVDVVNPEFNERFAKAKTDNAKAKLTKEKDKFIKGVHSLASLEQAIEHYTARHDDESVQAGKLGQYFKHGLAGVDNPIQKIHNNHSTIKGFLERERPAGERALPKIKSGKNPEMTQLRQLKELLDNALNVAHFAKLLTTKTTLDNQDGNFYGEFGALYDELAKIPTLYNKVRDYLSQKPFSTEKYKLNFGRPTLLNGWDLNKEKDNFGIILQKDGCYYLALLDKAHKKVFDNAPNTGKNVYQKMIYKLLPGPNKMLPKVFFAKSNLDYYNPSAELLDKYAQGTHKKGNNFNLKDCHALIDFFKAGINKHPEWQHFGFKFSPTSSYQDLSDFYREVEPQGYQVKFVDINADYINELVEQGQLYLFQIYNKDFSPKAHGKPNLHTLYFKALFSKDNLANPIYKLNGEAQIFYRKASLDMNETTIHRAGEVLENKNPDNPKKRQFVYDIIKDKRYTQDKFLLHVPITMNFGVQGMTIKEFNKKVNQSIQQYDEVNVIGIDRGERHLLYLTVINSKGEILEQRSLNDITTASANGTQMTTPYHKILDKREIERLNARVGWGEIETIKELKSGYLSHVVHQISQLMLKYNAIVVLEDLNFGFKRGRFKVEKQIYQNFENALIKKLNHLVLKDEADDEIGSYKNALQLTNNFTDLKSIGKQTGFLFYVPAWNTSKIDPETGFVDLLKPRYENIAQSQAFFGKFDKICYNADKDYFEFHIDYAKFTDKAKNSRQIWKICSHGDKRYVYDKTANQNKGATKGINVNDELKSLFARHHINDKQPNLVMDICQNNDKEFHKSLIYLLKTLLALRYSNASSDEDFILSPVANDEGMFFNSALADDTQPQNADANGAYHIALKGLWVLEQIKNSDDLNKVKLAIDNQTWLNFAQNRKRPAATKKAGQAKKKKGSYPYDVPDYAYPYDVPDYAYPYDVPDYAGSPKKKRKV

SEQ ID NO: 121 - DNA, 3088 bp, Artificial Sequence
  Synthetic sequence
ggccgcatctatgtcgggtgcggagaaagaggtaatgaaatggcaaagcttgaattcagtacattaaaaacgtccgcaatgtgttattaagttgtctaagcccgggctgggcctcatgggccttccgctcactgcccgctttccagtcgggaaacctgtcgtgccagctgcattaacatggtcatagctgtttccttgcgtattgggcgctctccgcttcctcgctcactgactcgctgcgctcggtcgttcgggtaaagcctggggtgcctaatgagcaaaaggccagcaaaaggccaggaaccgtaaaaaggccgcgttgctggcgtttttccataggctccgcccccctgacgagcatcacaaaaatcgacgctcaagtcagaggtggcgaaacccgacaggactataaagataccaggcgtttccccctggaagctccctcgtgcgctctcctgttccgaccctgccgcttaccggatacctgtccgcctttctcccttcgggaagcgtggcgctttctcatagctcacgctgtaggtatctcagttcggtgtaggtcgttcgctccaagctgggctgtgtgcacgaaccccccgttcagcccgaccgctgcgccttatccggtaactatcgtcttgagtccaacccggtaagacacgacttatcgccactggcagcagccactggtaacaggattagcagagcgaggtatgtaggcggtgctacagagttcttgaagtggtggcctaactacggctacactagaaggacagtatttggtatctgcgctctgctgaagccagttaccttcggaaaaagagttggtagctcttgatccggcaaacaaaccaccgctggtagcggtggtttttttgtttgcaagcagcagattacgcgcagaaaaaaaggatctcaagaagatcctttgatcttttctacggggtctgacgctcagtggaacgaaaactcacgttaagggattttggtcatgagattatcaaaaaggatcttcacctagatccttttaaattaaaaatgaagttttaaatcaatctaaagtatatatgagtaaacttggtctgacagttaccaatgcttaatcagtgaggcacctatctcagcgatctgtctatttcgttcatccatagttgcctgactccccgtcgtgtagataactacgatacgggagggcttaccatctggccccagtgctgcaatgataccgcgagacccacgctcaccggctccagatttatcagcaataaaccagccagccggaagggccgagcgcagaagtggtcctgcaactttatccgcctccatccagtctattaattgttgccgggaagctagagtaagtagttcgccagttaatagtttgcgcaacgttgttgccattgctacaggcatcgtggtgtcacgctcgtcgtttggtatggcttcattcagctccggttcccaacgatcaaggcgagttacatgatcccccatgttgtgcaaaaaagcggttagctccttcggtcctccgatcgttgtcagaagtaagttggccgcagtgttatcactcatggttatggcagcactgcataattctcttactgtcatgccatccgtaagatgcttttctgtgactggtgagtactcaaccaagtcattctgagaatagtgtatgcggcgaccgagttgctcttgcccggcgtcaatacgggataataccgcgccacatagcagaactttaaaagtgctcatcattggaaaacgttcttcggggcgaaaactctcaaggatcttaccgctgttgagatccagttcgatgtaacccactcgtgcacccaactgatcttcagcatcttttactttcaccagcgtttctgggtgagcaaaaacaggaaggcaaaatgccgcaaaaaagggaataagggcgacacggaaatgttgaatactcatactcttcctttttcaatattattgaagcatttatcagggttattgtctcatgagcggatacatatttgaatgtatttagaaaaataaacaaataggggttccgcgcacatttccccgaaaagtgccacctaaattgtaagcgttaatattttgttaaaattcgcgttaaatttttgttaaatcagctcattttttaaccaataggccgaaatcggcaaaatcccttataaatcaaaagaatagaccgagatagggttgagtggccgctacagggcgctcccattcgccattcaggctgcgcaactgttgggaagggcgtttcggtgcgggcctcttcgctattacgccagctggcgaaagggggatgtgctgcaaggcgattaagttgggtaacgccagggttttcccagtcacgacgttgtaaaacgacggccagtgagcgcgacgtaatacgactcactatagggcgaattggcggaaggccgtcaaggccgcatcccgggttgtagctccacgcgcttcggcaggggaagctctacttaatcggaagtccatatgattaccctgttatccctagcgatcgcctttttttcttcttcttcgttcatacagtttttttttgtttatcagcttacattttcttgaaccgtagctttcgttttcttctttttaactttccattcggagtttttgtatcttgtttcatagtttgtcccaggattagaatgattaggcatcgaaccttcaagaatttgattgaataaaacatcttcattcttaagatatgaagataatcttcaaaaggcccctgggaatctgaaagaagagaagcaggcccatttatatgggaaagaacaatagtatttcttatataggcccatttaagttgaaaacaatcttcaaaagtcccacatcgcttagataagaaaacgaagctgagtttatatacagctagagtcgaagtagtgattggaaattctgatgagtccgtgaggacgaaacgagtaagctcgtcaatttctactgttgtagatgtaccgatggtgaacaagtcctcaggccggcatggtcccagcctcctcgctggcgccggctgggcaacatgcttcggcatggcgaatgggacttttttttttgc

SEQ ID NO: 122 - DNA, 4036 bp, Artificial Sequence
  Synthetic sequence
ctaaattgtaagcgttaatattttgttaaaattcgcgttaaatttttgttaaatcagctcattttttaaccaataggccgaaatcggcaaaatcccttataaatcaaaagaatagaccgagatagggttgagtggccgctacagggcgctcccattcgccattcaggctgcgcaactgttgggaagggcgtttcggtgcgggcctcttcgctattacgccagctggcgaaagggggatgtgctgcaaggcgattaagttgggtaacgccagggttttcccagtcacgacgttgtaaaacgacggccagtgagcgcgacgtaatacgactcactatagggcgaattggcggaaggccgtcaaggccgcatcccgggttgtagctccacgcgcttcggcaggggaagctctacttaatcggaagtccatatgtaactataacggtcctaaggtagcgagcgatcgcttgcaaacagaggagatatactaagcctttggaagagtgtatagatgagctagaactctacacacttggtcaatactagatttatctgcatcaaatgctttccaccagggtggattctctgggagaggtacttgaaacctacgtgcagcagcatacacgaccccacaagccagaacctcacttctgaaccttacacaaagggttgtacgcagactatcattagccaaattccaagcttcttgcctcaattccggaggtgtttctagtgttcaacatgacaaacaaaacccatctctttcagtatatgtctctcagttgtgcttaattcaaatttcaactcagagaacttcttggcatacttatccagattatctaatgatctcatctaatggtaattcaactttcagtataagtctcgcagcaaactatctttacatcaaatttttaacaactcaatgcacaaaatacttttcctcaacctaaaaataaggcaattagccaaaaacaactttgcgtgtgaacaacgcgtacacgtccctacacatacctgtcaatttataattggctattgcttccacgccttagctttctcgtgaccgaccgagtcgtcctcgtcttttttgcttctataaatcaaatacccaaagagctcttcttcttcacaattcagattccaattttctcaaactctaaaatcaatctctcaaatctctcaaccgtgatcaaggtagatttctgagttcttattgtatttcttcgatttgtttcgttcgatcgcaatttaggctctgttctttgattttgatctcgttaatctctgatcggaggcaaattacatagtttcatcgttagatctcttcttatttctcgattagggttcgtatttttcgcagatctgtttattttcttgttgtttccttgtatttgatccgatttgttgaaagaatttgtgtgttctcgattatttacgctttgatctgtgatttttatctagatttggtgttagtttcttgtttgtgcgatcgaatttgtcgattaatctcggtttatctgattaacagggatccaaattactgatgagtccgtgaggacgaaacgagtaagctcgtctaatttctactgttgtagatgtaccgatggtgaacaagtcctcaggccggcatggtcccagcctcctcgctggcgccggctgggcaacatgcttcggcatggcgaatgggaccgagtatcgaattcctgcaggcatgcaagcgatccccgatcgttcaaacatttggcaataaagtttcttaagattgaatcctgttgccggtcttgcgatgattatcatataatttctgttgaattacgttaagcatgtaataattaacatgtaatgcatgacgttatttatgagatgggtttttatgattagagtcccgcaattatacatttaatacgcgatagaaaacaaaatatagcgcgcaaactaggataaattatcgcgcgcggtgtcatctatgttactagatcggcggccgcattaccctgttatccctaaagcttgaattcagtacattaaaaacgtccgcaatgtgttattaagttgtctaagcccgggctgggcctcatgggccttccgctcactgcccgctttccagtcgggaaacctgtcgtgccagctgcattaacatggtcatagctgtttccttgcgtattgggcgctctccgcttcctcgctcactgactcgctgcgctcggtcgttcgggtaaagcctggggtgcctaatgagcaaaaggccagcaaaaggccaggaaccgtaaaaaggccgcgttgctggcgtttttccataggctccgcccccctgacgagcatcacaaaaatcgacgctcaagtcagaggtggcgaaacccgacaggactataaagataccaggcgtttccccctggaagctccctcgtgcgctctcctgttccgaccctgccgcttaccggatacctgtccgcctttctcccttcgggaagcgtggcgctttctcatagctcacgctgtaggtatctcagttcggtgtaggtcgttcgctccaagctgggctgtgtgcacgaaccccccgttcagcccgaccgctgcgccttatccggtaactatcgtcttgagtccaacccggtaagacacgacttatcgccactggcagcagccactggtaacaggattagcagagcgaggtatgtaggcggtgctacagagttcttgaagtggtggcctaactacggctacactagaagaacagtatttggtatctgcgctctgctgaagccagttaccttcggaaaaagagttggtagctcttgatccggcaaacaaaccaccgctggtagcggtggtttttttgtttgcaagcagcagattacgcgcagaaaaaaaggatctcaagaagatcctttgatcttttctacggggtctgacgctcagtggaacgaaaactcacgttaagggattttggtcatgagattatcaaaaaggatcttcacctagatccttttaaattaaaaatgaagttttaaatcaatctaaagtatatatgagtaaacttggtctgacagttaccaatgcttaatcagtgaggcacctatctcagcgatctgtctatttcgttcatccatagttgcctgactccccgtcgtgtagataactacgatacgggagggcttaccatctggccccagtgctgcaatgataccgcgagaaccacgctcaccggctccagatttatcagcaataaaccagccagccggaagggccgagcgcagaagtggtcctgcaactttatccgcctccatccagtctattaattgttgccgggaagctagagtaagtagttcgccagttaatagtttgcgcaacgttgttgccattgctacaggcatcgtggtgtcacgctcgtcgtttggtatggcttcattcagctccggttcccaacgatcaaggcgagttacatgatcccccatgttgtgcaaaaaagcggttagctccttcggtcctccgatcgttgtcagaagtaagttggccgcagtgttatcactcatggttatggcagcactgcataattctcttactgtcatgccatccgtaagatgcttttctgtgactggtgagtactcaaccaagtcattctgagaatagtgtatgcggcgaccgagttgctcttgcccggcgtcaatacgggataataccgcgccacatagcagaactttaaaagtgctcatcattggaaaacgttcttcggggcgaaaactctcaaggatcttaccgctgttgagatccagttcgatgtaacccactcgtgcacccaactgatcttcagcatcttttactttcaccagcgtttctgggtgagcaaaaacaggaaggcaaaatgccgcaaaaaagggaataagggcgacacggaaatgttgaatactcatactcttcctttttcaatattattgaagcatttatcagggttattgtctcatgagcggatacatatttgaatgtatttagaaaaataaacaaataggggttccgcgcacatttccccgaaaagtgccac

SEQ ID NO: 123 - DNA, 7837 bp, Artificial Sequence
  Synthetic sequence
ctaaattgtaagcgttaatattttgttaaaattcgcgttaaatttttgttaaatcagctcattttttaaccaataggccgaaatcggcaaaatcccttataaatcaaaagaatagaccgagatagggttgagtggccgctacagggcgctcccattcgccattcaggctgcgcaactgttgggaagggcgtttcggtgcgggcctcttcgctattacgccagctggcgaaagggggatgtgctgcaaggcgattaagttgggtaacgccagggttttcccagtcacgacgttgtaaaacgacggccagtgagcgcgacgtaatacgactcactatagggcgaattggcggaaggccgtcaaggccgcatcccgggttgtagctccacgcgcttcggcaggggaagctctacttaatcggaagtccatatgtaactataacggtcctaaggtagcgagcgatcgcttgcaaacagaggagatatactaagcctttggaagagtgtatagatgagctagaactctacacacttggtcaatactagatttatctgcatcaaatgctttccaccagggtggattctctgggagaggtacttgaaacctacgtgcagcagcatacacgaccccacaagccagaacctcacttctgaaccttacacaaagggttgtacgcagactatcattagccaaattccaagcttcttgcctcaattccggaggtgtttctagtgttcaacatgacaaacaaaacccatctctttcagtatatgtctctcagttgtgcttaattcaaatttcaactcagagaacttcttggcatacttatccagattatctaatgatctcatctaatggtaattcaactttcagtataagtctcgcagcaaactatctttacatcaaatttttaacaactcaatgcacaaaatacttttcctcaacctaaaaataaggcaattagccaaaaacaactttgcgtgtgaacaacgcgtacacgtccctacacatacctgtcaatttataattggctattgcttccacgccttagctttctcgtgaccgaccgagtcgtcctcgtcttttttgcttctataaatcaaatacccaaagagctcttcttcttcacaattcagattccaattttctcaaactctaaaatcaatctctcaaatctctcaaccgtgatcaaggtagatttctgagttcttattgtatttcttcgatttgtttcgttcgatcgcaatttaggctctgttctttgattttgatctcgttaatctctgatcggaggcaaattacatagtttcatcgttagatctcttcttatttctcgattagggttcgtatttttcgcagatctgtttattttcttgttgtttccttgtatttgatccgatttgttgaaagaatttgtgtgttctcgattatttacgctttgatctgtgatttttatctagatttggtgttagtttcttgtttgtgcgatcgaatttgtcgattaatctcggtttatctgattaacaggtttaaacatggccctgttccaggacttcacccatctctacccactctcaaagaccatgcgcttcgagcttaagccaatcggaaagacccttgagcacatccacgccaagaactttttgtcccaggatgagactatggccgacatgtaccagaaggtgaaggctatcctcgatgactaccacagggatttcattgccgacatgatgggcgaagtgaagcttaccaagctcgccgagttctacgatgtgtacctcaagttccgcaagaacccaaaggatgatggactccagaagcagctcaaggatcttcaggctgtgctgcgcaaagagatcgttaagcctattggaaacggcggcaagtacaaggctggatacgatagacttttcggcgccaagcttttcaaggacggaaaagagcttggcgacctcgctaagttcgtgattgctcaagaaggcgagtcctctccaaagcttgctcatttggctcacttcgagaagttctccacctacttcaccggcttccacgacaaccgtaagaacatgtactccgacgaggataagcacaccgctattacctacaggctcatccacgagaacctgccacgcttcattgataacctccagatcctcgctaccatcaagcaaaagcactctgccctctacgaccagatcatcaacgagcttactgcctccggacttgatgtgtctcttgcttctcacctcgacggctaccataagcttttgacccaagagggcattaccgcctacaacactcttctcggaggaatttctggtgaggctggctctaggaagatccagggtattaacgaactcatcaactcccaccacaaccagcactgccataagtctgagaggattgctaagctcaggccactccacaagcagatcctttctgatggaatgggcgtgtccttcctgccatcaaagttcgctgatgactctgagatgtgccaggctgtgaacgagttctataggcactacgctgatgtgttcgccaaggtgcagtctctcttcgatggattcgatgaccaccaaaaggacggcatctacgtcgagcacaagaacctcaacgagttgtccaagcaggctttcggagatttcgctctccttggaagagtgctggatggctactatgtggatgttgtgaaccccgagttcaacgagagattcgctaaggctaagaccgataacgctaaggccaagctcaccaaagagaaggacaagttcatcaagggcgtgcactcactcgcttctctcgaacaagctattgagcactacaccgctaggcacgatgatgagtctgttcaggctggaaagctcggccaatatttcaagcacggacttgctggtgtggacaacccaattcagaagatccacaacaaccactccaccatcaagggattccttgagagagaaagaccagctggcgaaagggctctcccaaagattaagtctggaaagaacccagagatgacccagctcaggcagcttaaagagcttcttgacaacgctcttaacgtggcccacttcgctaagcttctcactaccaagaccactctcgataaccaggacggtaacttctacggtgagttcggtgctctctacgatgagcttgctaagatccccaccttgtacaacaaggtgagggactaccttagccagaagccattctctaccgagaagtacaagctcaacttcggcaacccaaccttgctcaacggatgggatctcaacaaagaaaaggataacttcgggatcatcctccagaaggacggttgctactaccttgctttgctcgataaggcccacaagaaggtgttcgataacgcaccaaacaccggcaagaacgtctaccagaagatgatctacaagctgctccccggaccaaacaagatgcttccaaaggtgttcttcgccaagtccaacctcgactactacaacccttctgctgagctgttggataagtacgctcagggcactcataagaagggcaacaacttcaacctcaaggactgccacgcactcatcgatttcttcaaggccggaatcaacaagcacccagagtggcaacatttcggcttcaagttctccccaaccagctcctaccaggatctctctgatttctacagagaggttgagccacagggctaccaggtgaagttcgtggatatcaacgccgactacatcaacgaacttgttgagcagggacagctctacctcttccagatctataacaaggacttcagccctaaggctcacggcaagccaaaccttcataccctctacttcaaggctctgttctccaaggacaacctcgcaaaccccatctacaagttgaacggcgaggctcagatcttctaccgcaaggcttctcttgacatgaacgagactaccatccacagagctggtgaggtgctcgaaaacaagaaccctgataaccccaagaaacgccagttcgtgtacgacatcatcaaggacaagaggtacacccaggataagttcatgctccacgtgccaatcaccatgaacttcggagttcagggcatgaccatcaaagagttcaacaagaaagtcaaccagagcatccagcagtacgacgaggttaacgtgatcggaattgatagaggtgagaggcaccttctctacctcaccgtgattaactccaagggcgagattctcgagcagcgctcccttaacgatattaccactgcttctgctaacggcacccagatgactactccataccacaagatcctcgacaagcgcgagattgagagactcaacgctagagttggatggggcgagatcgagactatcaaagagcttaagtccggctacctctctcacgttgtgcaccagatttcccagctcatgctcaagtacaacgctatcgtggtgcttgaggaccttaacttcggtttcaagcgcggaaggttcaaggtcgagaagcagatctaccaaaacttcgaaaacgccctcattaagaagctcaaccacctcgttctcaaggatgaggctgatgatgagatcggctcttacaagaacgctctccagctcactaacaactttaccgacctcaagtccatcggaaagcagaccggattcttgttctacgtgccagcttggaacacctccaagatcgatccagagactggattcgtggatctcctcaagccacgctacgagaacattgctcaatcccaggctttcttcggcaagttcgacaagatctgctacaacgctgacaaggactacttcgagttccacatcgactacgccaagttcaccgacaaggcaaagaactccaggcagatatggaagatctgcagtcacggcgacaagcgttacgtgtacgataagactgccaaccagaacaagggtgctaccaagggaatcaacgtgaacgacgagctgaagtcactcttcgctaggcatcacattaacgacaagcagcccaacctcgtgatggacatttgccagaacaacgacaaagaattccacaagtccctgatctacctcctcaagacccttcttgctctcaggtactccaacgcttcctccgatgaggatttcatcttgtccccagtggctaacgatgagggcatgttcttcaactccgctcttgctgatgatacccagccacaaaacgctgatgctaacggtgcttaccacattgctctcaaaggactttgggtcctcgagcagatcaagaactccgatgacctcaacaaggttaagctcgccattgacaaccagacctggttgaacttcgctcagaacaggaaaaggccggcggccacgaaaaaggccggccaggcaaaaaagaaaaagggatcctacccatacgatgttccagattacgcttatccctacgacgtgcctgattatgcatacccatatgatgtccccgactatgccggatccccaaagaaaaagcgcaaggtgtgacggaccgtgacgatcaaccataccagaggcgcgccatatgaagatgaagatgaaatatttggtgtgtcaaataaaaagcttgtgtgcttaagtttgtgtttttttcttggcttgttgtgttatgaatttgtggctttttctaatattaaatgaatgtaagatctcattataatgaataaacaaatgtttctataatccattgtgaatgttttgttggatctcttctgcagcatataactactgtatgtgctatggtatggactatggaatatgattaaagataaggcggccgcattaccctgttatccctaaagcttgaattcagtacattaaaaacgtccgcaatgtgttattaagttgtctaagcccgggctgggcctcatgggccttccgctcactgcccgctttccagtcgggaaacctgtcgtgccagctgcattaacatggtcatagctgtttccttgcgtattgggcgctctccgcttcctcgctcactgactcgctgcgctcggtcgttcgggtaaagcctggggtgcctaatgagcaaaaggccagcaaaaggccaggaaccgtaaaaaggccgcgttgctggcgtttttccataggctccgcccccctgacgagcatcacaaaaatcgacgctcaagtcagaggtggcgaaacccgacaggactataaagataccaggcgtttccccctggaagctccctcgtgcgctctcctgttccgaccctgccgcttaccggatacctgtccgcctttctcccttcgggaagcgtggcgctttctcatagctcacgctgtaggtatctcagttcggtgtaggtcgttcgctccaagctgggctgtgtgcacgaaccccccgttcagcccgaccgctgcgccttatccggtaactatcgtcttgagtccaacccggtaagacacgacttatcgccactggcagcagccactggtaacaggattagcagagcgaggtatgtaggcggtgctacagagttcttgaagtggtggcctaactacggctacactagaagaacagtatttggtatctgcgctctgctgaagccagttaccttcggaaaaagagttggtagctcttgatccggcaaacaaaccaccgctggtagcggtggtttttttgtttgcaagcagcagattacgcgcagaaaaaaaggatctcaagaagatcctttgatcttttctacggggtctgacgctcagtggaacgaaaactcacgttaagggattttggtcatgagattatcaaaaaggatcttcacctagatccttttaaattaaaaatgaagttttaaatcaatctaaagtatatatgagtaaacttggtctgacagttaccaatgcttaatcagtgaggcacctatctcagcgatctgtctatttcgttcatccatagttgcctgactccccgtcgtgtagataactacgatacgggagggcttaccatctggccccagtgctgcaatgataccgcgagaaccacgctcaccggctccagatttatcagcaataaaccagccagccggaagggccgagcgcagaagtggtcctgcaactttatccgcctccatccagtctattaattgttgccgggaagctagagtaagtagttcgccagttaatagtttgcgcaacgttgttgccattgctacaggcatcgtggtgtcacgctcgtcgtttggtatggcttcattcagctccggttcccaacgatcaaggcgagttacatgatcccccatgttgtgcaaaaaagcggttagctccttcggtcctccgatcgttgtcagaagtaagttggccgcagtgttatcactcatggttatggcagcactgcataattctcttactgtcatgccatccgtaagatgcttttctgtgactggtgagtactcaaccaagtcattctgagaatagtgtatgcggcgaccgagttgctcttgcccggcgtcaatacgggataataccgcgccacatagcagaactttaaaagtgctcatcattggaaaacgttcttcggggcgaaaactctcaaggatcttaccgctgttgagatccagttcgatgtaacccactcgtgcacccaactgatcttcagcatcttttactttcaccagcgtttctgggtgagcaaaaacaggaaggcaaaatgccgcaaaaaagggaataagggcgacacggaaatgttgaatactcatactcttcctttttcaatattattgaagcatttatcagggttattgtctcatgagcggatacatatttgaatgtatttagaaaaataaacaaataggggttccgcgcacatttccccgaaaagtgccac

SEQ ID NO: 124 - DNA, 7837 bp, Artificial Sequence
  Synthetic sequence
ctaaattgtaagcgttaatattttgttaaaattcgcgttaaatttttgttaaatcagctcattttttaaccaataggccgaaatcggcaaaatcccttataaatcaaaagaatagaccgagatagggttgagtggccgctacagggcgctcccattcgccattcaggctgcgcaactgttgggaagggcgtttcggtgcgggcctcttcgctattacgccagctggcgaaagggggatgtgctgcaaggcgattaagttgggtaacgccagggttttcccagtcacgacgttgtaaaacgacggccagtgagcgcgacgtaatacgactcactatagggcgaattggcggaaggccgtcaaggccgcatcccgggttgtagctccacgcgcttcggcaggggaagctctacttaatcggaagtccatatgtaactataacggtcctaaggtagcgagcgatcgcttgcaaacagaggagatatactaagcctttggaagagtgtatagatgagctagaactctacacacttggtcaatactagatttatctgcatcaaatgctttccaccagggtggattctctgggagaggtacttgaaacctacgtgcagcagcatacacgaccccacaagccagaacctcacttctgaaccttacacaaagggttgtacgcagactatcattagccaaattccaagcttcttgcctcaattccggaggtgtttctagtgttcaacatgacaaacaaaacccatctctttcagtatatgtctctcagttgtgcttaattcaaatttcaactcagagaacttcttggcatacttatccagattatctaatgatctcatctaatggtaattcaactttcagtataagtctcgcagcaaactatctttacatcaaatttttaacaactcaatgcacaaaatacttttcctcaacctaaaaataaggcaattagccaaaaacaactttgcgtgtgaacaacgcgtacacgtccctacacatacctgtcaatttataattggctattgcttccacgccttagctttctcgtgaccgaccgagtcgtcctcgtcttttttgcttctataaatcaaatacccaaagagctcttcttcttcacaattcagattccaattttctcaaactctaaaatcaatctctcaaatctctcaaccgtgatcaaggtagatttctgagttcttattgtatttcttcgatttgtttcgttcgatcgcaatttaggctctgttctttgattttgatctcgttaatctctgatcggaggcaaattacatagtttcatcgttagatctcttcttatttctcgattagggttcgtatttttcgcagatctgtttattttcttgttgtttccttgtatttgatccgatttgttgaaagaatttgtgtgttctcgattatttacgctttgatctgtgatttttatctagatttggtgttagtttcttgtttgtgcgatcgaatttgtcgattaatctcggtttatctgattaacaggtttaaacatggccctgttccaggacttcacccatctctacccactctcaaagaccatgcgcttcgagcttaagccaatcggaaagacccttgagcacatccacgccaagaactttttgtcccaggatgagactatggccgacatgtaccagaaggtgaaggctatcctcgatgactaccacagggatttcattgccgacatgatgggcgaagtgaagcttaccaagctcgccgagttctacgatgtgtacctcaagttccgcaagaacccaaaggatgatggactccagaagcagctcaaggatcttcaggctgtgctgcgcaaagagatcgttaagcctattggaaacggcggcaagtacaaggctggatacgatagacttttcggcgccaagcttttcaaggacggaaaagagcttggcgacctcgctaagttcgtgattgctcaagaaggcgagtcctctccaaagcttgctcatttggctcacttcgagaagttctccacctacttcaccggcttccacagaaaccgtaagaacatgtactccgacgaggataagcacaccgctattacctacaggctcatccacgagaacctgccacgcttcattgataacctccagatcctcgctaccatcaagcaaaagcactctgccctctacgaccagatcatcaacgagcttactgcctccggacttgatgtgtctcttgcttctcacctcgacggctaccataagcttttgacccaagagggcattaccgcctacaacactcttctcggaggaatttctggtgaggctggctctaggaagatccagggtattaacgaactcatcaactcccaccacaaccagcactgccataagtctgagaggattgctaagctcaggccactccacaagcagatcctttctgatggaatgggcgtgtccttcctgccatcaaagttcgctgatgactctgagatgtgccaggctgtgaacgagttctataggcactacgctgatgtgttcgccaaggtgcagtctctcttcgatggattcgatgaccaccaaaaggacggcatctacgtcgagcacaagaacctcaacgagttgtccaagcaggctttcggagatttcgctctccttggaagagtgctggatggctactatgtggatgttgtgaaccccgagttcaacgagagattcgctaaggctaagaccgataacgctaaggccaagctcaccaaagagaaggacaagttcatcaagggcgtgcactcactcgcttctctcgaacaagctattgagcactacaccgctaggcacgatgatgagtctgttcaggctggaaagctcggccaatatttcaagcacggacttgctggtgtggacaacccaattcagaagatccacaacaaccactccaccatcaagggattccttgagagagaaagaccagctggcgaaagggctctcccaaagattaagtctggaaagaacccagagatgacccagctcaggcagcttaaagagcttcttgacaacgctcttaacgtggcccacttcgctaagcttctcactaccaagaccactctcgataaccaggacggtaacttctacggtgagttcggtgctctctacgatgagcttgctaagatccccaccttgtacaacaaggtgagggactaccttagccagaagccattctctaccgagaagtacaagctcaacttcggcaacccaaccttgctcaacggatgggatctcaacaaagaaaaggataacttcgggatcatcctccagaaggacggttgctactaccttgctttgctcgataaggcccacaagaaggtgttcgataacgcaccaaacaccggcaagaacgtctaccagaagatgatctacaagctgctccccggaccaaacaagatgcttccaaaggtgttcttcgccaagtccaacctcgactactacaacccttctgctgagctgttggataagtacgctcagggcactcataagaagggcaacaacttcaacctcaaggactgccacgcactcatcgatttcttcaaggccggaatcaacaagcacccagagtggcaacatttcggcttcaagttctccccaaccagctcctaccaggatctctctgatttctacagagaggttgagccacagggctaccaggtgaagttcgtggatatcaacgccgactacatcaacgaacttgttgagcagggacagctctacctcttccagatctataacaaggacttcagccctaaggctcacggcaagccaaaccttcataccctctacttcaaggctctgttctccaaggacaacctcgcaaaccccatctacaagttgaacggcgaggctcagatcttctaccgcaaggcttctcttgacatgaacgagactaccatccacagagctggtgaggtgctcgaaaacaagaaccctgataaccccaagaaacgccagttcgtgtacgacatcatcaaggacaagaggtacacccaggataagttcatgctccacgtgccaatcaccatgaacttcggagttcagggcatgaccatcaaagagttcaacaagaaagtcaaccagagcatccagcagtacgacgaggttaacgtgatcggaattgatagaggtgagaggcaccttctctacctcaccgtgattaactccaagggcgagattctcgagcagcgctcccttaacgatattaccactgcttctgctaacggcacccagatgactactccataccacaagatcctcgacaagcgcgagattgagagactcaacgctagagttggatggggcgagatcgagactatcaaagagcttaagtccggctacctctctcacgttgtgcaccagatttcccagctcatgctcaagtacaacgctatcgtggtgcttgaggaccttaacttcggtttcaagcgcggaaggttcaaggtcgagaagcagatctaccaaaacttcgaaaacgccctcattaagaagctcaaccacctcgttctcaaggatgaggctgatgatgagatcggctcttacaagaacgctctccagctcactaacaactttaccgacctcaagtccatcggaaagcagaccggattcttgttctacgtgccagcttggaacacctccaagatcgatccagagactggattcgtggatctcctcaagccacgctacgagaacattgctcaatcccaggctttcttcggcaagttcgacaagatctgctacaacgctgacaaggactacttcgagttccacatcgactacgccaagttcaccgacaaggcaaagaactccaggcagatatggaagatctgcagtcacggcgacaagcgttacgtgtacgataagactgccaaccagaacaagggtgctaccaagggaatcaacgtgaacgacgagctgaagtcactcttcgctaggcatcacattaacgacaagcagcccaacctcgtgatggacatttgccagaacaacgacaaagaattccacaagtccctgatctacctcctcaagacccttcttgctctcaggtactccaacgcttcctccgatgaggatttcatcttgtccccagtggctaacgatgagggcatgttcttcaactccgctcttgctgatgatacccagccacaaaacgctgatgctaacggtgcttaccacattgctctcaaaggactttgggtcctcgagcagatcaagaactccgatgacctcaacaaggttaagctcgccattgacaaccagacctggttgaacttcgctcagaacaggaaaaggccggcggccacgaaaaaggccggccaggcaaaaaagaaaaagggatcctacccatacgatgttccagattacgcttatccctacgacgtgcctgattatgcatacccatatgatgtccccgactatgccggatccccaaagaaaaagcgcaaggtgtgacggaccgtgacgatcaaccataccagaggcgcgccatatgaagatgaagatgaaatatttggtgtgtcaaataaaaagcttgtgtgcttaagtttgtgtttttttcttggcttgttgtgttatgaatttgtggctttttctaatattaaatgaatgtaagatctcattataatgaataaacaaatgtttctataatccattgtgaatgttttgttggatctcttctgcagcatataactactgtatgtgctatggtatggactatggaatatgattaaagataaggcggccgcattaccctgttatccctaaagcttgaattcagtacattaaaaacgtccgcaatgtgttattaagttgtctaagcccgggctgggcctcatgggccttccgctcactgcccgctttccagtcgggaaacctgtcgtgccagctgcattaacatggtcatagctgtttccttgcgtattgggcgctctccgcttcctcgctcactgactcgctgcgctcggtcgttcgggtaaagcctggggtgcctaatgagcaaaaggccagcaaaaggccaggaaccgtaaaaaggccgcgttgctggcgtttttccataggctccgcccccctgacgagcatcacaaaaatcgacgctcaagtcagaggtggcgaaacccgacaggactataaagataccaggcgtttccccctggaagctccctcgtgcgctctcctgttccgaccctgccgcttaccggatacctgtccgcctttctcccttcgggaagcgtggcgctttctcatagctcacgctgtaggtatctcagttcggtgtaggtcgttcgctccaagctgggctgtgtgcacgaaccccccgttcagcccgaccgctgcgccttatccggtaactatcgtcttgagtccaacccggtaagacacgacttatcgccactggcagcagccactggtaacaggattagcagagcgaggtatgtaggcggtgctacagagttcttgaagtggtggcctaactacggctacactagaagaacagtatttggtatctgcgctctgctgaagccagttaccttcggaaaaagagttggtagctcttgatccggcaaacaaaccaccgctggtagcggtggtttttttgtttgcaagcagcagattacgcgcagaaaaaaaggatctcaagaagatcctttgatcttttctacggggtctgacgctcagtggaacgaaaactcacgttaagggattttggtcatgagattatcaaaaaggatcttcacctagatccttttaaattaaaaatgaagttttaaatcaatctaaagtatatatgagtaaacttggtctgacagttaccaatgcttaatcagtgaggcacctatctcagcgatctgtctatttcgttcatccatagttgcctgactccccgtcgtgtagataactacgatacgggagggcttaccatctggccccagtgctgcaatgataccgcgagaaccacgctcaccggctccagatttatcagcaataaaccagccagccggaagggccgagcgcagaagtggtcctgcaactttatccgcctccatccagtctattaattgttgccgggaagctagagtaagtagttcgccagttaatagtttgcgcaacgttgttgccattgctacaggcatcgtggtgtcacgctcgtcgtttggtatggcttcattcagctccggttcccaacgatcaaggcgagttacatgatcccccatgttgtgcaaaaaagcggttagctccttcggtcctccgatcgttgtcagaagtaagttggccgcagtgttatcactcatggttatggcagcactgcataattctcttactgtcatgccatccgtaagatgcttttctgtgactggtgagtactcaaccaagtcattctgagaatagtgtatgcggcgaccgagttgctcttgcccggcgtcaatacgggataataccgcgccacatagcagaactttaaaagtgctcatcattggaaaacgttcttcggggcgaaaactctcaaggatcttaccgctgttgagatccagttcgatgtaacccactcgtgcacccaactgatcttcagcatcttttactttcaccagcgtttctgggtgagcaaaaacaggaaggcaaaatgccgcaaaaaagggaataagggcgacacggaaatgttgaatactcatactcttcctttttcaatattattgaagcatttatcagggttattgtctcatgagcggatacatatttgaatgtatttagaaaaataaacaaataggggttccgcgcacatttccccgaaaagtgccac

SEQ ID NO: 125 - DNA, 7416 bp, Artificial Sequence
  Synthetic sequence
ctaaattgtaagcgggtaccatatggtctcatgccaggcctgcgatcgcttgcaaacagaggagatatactaagcctttggaagagtgtatagatgagctagaactctacacacttggtcaatactagatttatctgcatcaaatgctttccaccagggtggattctctgggagaggtacttgaaacctacgtgcagcagcatacacgaccccacaagccagaacctcacttctgaaccttacacaaagggttgtacgcagactatcattagccaaattccaagcttcttgcctcaattccggaggtgtttctagtgttcaacatgacaaacaaaacccatctctttcagtatatgtctctcagttgtgcttaattcaaatttcaactcagagaacttcttggcatacttatccagattatctaatgatctcatctaatggtaattcaactttcagtataagtctcgcagcaaactatctttacatcaaatttttaacaactcaatgcacaaaatacttttcctcaacctaaaaataaggcaattagccaaaaacaactttgcgtgtgaacaacgcgtacacgtccctacacatacctgtcaatttataattggctattgcttccacgccttagctttctcgtgaccgaccgagtcgtcctcgtcttttttgcttctataaatcaaatacccaaagagctcttcttcttcacaattcagattccaattttctcaaactctaaaatcaatctctcaaatctctcaaccgtgatcaaggtagatttctgagttcttattgtatttcttcgatttgtttcgttcgatcgcaatttaggctctgttctttgattttgatctcgttaatctctgatcggaggcaaattacatagtttcatcgttagatctcttcttatttctcgattagggttcgtatttttcgcagatctgtttattttcttgttgtttccttgtatttgatccgatttgttgaaagaatttgtgtgttctcgattatttacgctttgatctgtgatttttatctagatttggtgttagtttcttgtttgtgcgatcgaatttgtcgattaatctcggtttatctgattaacaggtttaaacatggccctgttccaggacttcacccatctctacccactctcaaagaccatgcgcttcgagcttaagccaatcggaaagacccttgagcacatccacgccaagaactttttgtcccaggatgagactatggccgacatgtaccagaaggtgaaggctatcctcgatgactaccacagggatttcattgccgacatgatgggcgaagtgaagcttaccaagctcgccgagttctacgatgtgtacctcaagttccgcaagaacccaaaggatgatggactccagaagcagctcaaggatcttcaggctgtgctgcgcaaagagatcgttaagcctattggaaacggcggcaagtacaaggctggatacgatagacttttcggcgccaagcttttcaaggacggaaaagagcttggcgacctcgctaagttcgtgattgctcaagaaggcgagtcctctccaaagcttgctcatttggctcacttcgagaagttctccacctacttcaccagattccacgataaccgtaagaacatgtactccgacgaggataagcacaccgctattacctacaggctcatccacgagaacctgccacgcttcattgataacctccagatcctcgctaccatcaagcaaaagcactctgccctctacgaccagatcatcaacgagcttactgcctccggacttgatgtgtctcttgcttctcacctcgacggctaccataagcttttgacccaagagggcattaccgcctacaacactcttctcggaggaatttctggtgaggctggctctaggaagatccagggtattaacgaactcatcaactcccaccacaaccagcactgccataagtctgagaggattgctaagctcaggccactccacaagcagatcctttctgatggaatgggcgtgtccttcctgccatcaaagttcgctgatgactctgagatgtgccaggctgtgaacgagttctataggcactacgctgatgtgttcgccaaggtgcagtctctcttcgatggattcgatgaccaccaaaaggacggcatctacgtcgagcacaagaacctcaacgagttgtccaagcaggctttcggagatttcgctctccttggaagagtgctggatggctactatgtggatgttgtgaaccccgagttcaacgagagattcgctaaggctaagaccgataacgctaaggccaagctcaccaaagagaaggacaagttcatcaagggcgtgcactcactcgcttctctcgaacaagctattgagcactacaccgctaggcacgatgatgagtctgttcaggctggaaagctcggccaatatttcaagcacggacttgctggtgtggacaacccaattcagaagatccacaacaaccactccaccatcaagggattccttgagagagaaagaccagctggcgaaagggctctcccaaagattaagtctggaaagaacccagagatgacccagctcaggcagcttaaagagcttcttgacaacgctcttaacgtggcccacttcgctaagcttctcactaccaagaccactctcgataaccaggacggtaacttctacggtgagttcggtgctctctacgatgagcttgctaagatccccaccttgtacaacaaggtgagggactaccttagccagaagccattctctaccgagaagtacaagctcaacttcggcaacccaaccttgctcaacggatgggatctcaacaaagaaaaggataacttcgggatcatcctccagaaggacggttgctactaccttgctttgctcgataaggcccacaagaaggtgttcgataacgcaccaaacaccggcaagaacgtctaccagaagatgatctacaagctgctccccggaccaaacaagatgcttccaaaggtgttcttcgccaagtccaacctcgactactacaacccttctgctgagctgttggataagtacgctcagggcactcataagaagggcaacaacttcaacctcaaggactgccacgcactcatcgatttcttcaaggccggaatcaacaagcacccagagtggcaacatttcggcttcaagttctccccaaccagctcctaccaggatctctctgatttctacagagaggttgagccacagggctaccaggtgaagttcgtggatatcaacgccgactacatcaacgaacttgttgagcagggacagctctacctcttccagatctataacaaggacttcagccctaaggctcacggcaagccaaaccttcataccctctacttcaaggctctgttctccaaggacaacctcgcaaaccccatctacaagttgaacggcgaggctcagatcttctaccgcaaggcttctcttgacatgaacgagactaccatccacagagctggtgaggtgctcgaaaacaagaaccctgataaccccaagaaacgccagttcgtgtacgacatcatcaaggacaagaggtacacccaggataagttcatgctccacgtgccaatcaccatgaacttcggagttcagggcatgaccatcaaagagttcaacaagaaagtcaaccagagcatccagcagtacgacgaggttaacgtgatcggaattgatagaggtgagaggcaccttctctacctcaccgtgattaactccaagggcgagattctcgagcagcgctcccttaacgatattaccactgcttctgctaacggcacccagatgactactccataccacaagatcctcgacaagcgcgagattgagagactcaacgctagagttggatggggcgagatcgagactatcaaagagcttaagtccggctacctctctcacgttgtgcaccagatttcccagctcatgctcaagtacaacgctatcgtggtgcttgaggaccttaacttcggtttcaagcgcggaaggttcaaggtcgagaagcagatctaccaaaacttcgaaaacgccctcattaagaagctcaaccacctcgttctcaaggatgaggctgatgatgagatcggctcttacaagaacgctctccagctcactaacaactttaccgacctcaagtccatcggaaagcagaccggattcttgttctacgtgccagcttggaacacctccaagatcgatccagagactggattcgtggatctcctcaagccacgctacgagaacattgctcaatcccaggctttcttcggcaagttcgacaagatctgctacaacgctgacaaggactacttcgagttccacatcgactacgccaagttcaccgacaaggcaaagaactccaggcagatatggaagatctgcagtcacggcgacaagcgttacgtgtacgataagactgccaaccagaacaagggtgctaccaagggaatcaacgtgaacgacgagctgaagtcactcttcgctaggcatcacattaacgacaagcagcccaacctcgtgatggacatttgccagaacaacgacaaagaattccacaagtccctgatctacctcctcaagacccttcttgctctcaggtactccaacgcttcctccgatgaggatttcatcttgtccccagtggctaacgatgagggcatgttcttcaactccgctcttgctgatgatacccagccacaaaacgctgatgctaacggtgcttaccacattgctctcaaaggactttgggtcctcgagcagatcaagaactccgatgacctcaacaaggttaagctcgccattgacaaccagacctggttgaacttcgctcagaacaggaaaaggccggcggccacgaaaaaggccggccaggcaaaaaagaaaaagggatcctacccatacgatgttccagattacgcttatccctacgacgtgcctgattatgcatacccatatgatgtccccgactatgccggatccccaaagaaaaagcgcaaggtgtgacggaccgtgacgatcaaccataccagaggcgcgccatatgaagatgaagatgaaatatttggtgtgtcaaataaaaagcttgtgtgcttaagtttgtgtttttttcttggcttgttgtgttatgaatttgtggctttttctaatattaaatgaatgtaagatctcattataatgaataaacaaatgtttctataatccattgtgaatgttttgttggatctcttctgcagcatataactactgtatgtgctatggtatggactatggaatatgattaaagataaggcggccgaacgagaccatatactagtgaattcagtacattaaaaacgtccgcaatgtgttattaagttgtctaagcccgggctgggcctcatgggccttccgctcactgcccgctttccagtcgggaaacctgtcgtgccagctgcattaacatggtcatagctgtttccttgcgtattgggcgctctccgcttcctcgctcactgactcgctgcgctcggtcgttcgggtaaagcctggggtgcctaatgagcaaaaggccagcaaaaggccaggaaccgtaaaaaggccgcgttgctggcgtttttccataggctccgcccccctgacgagcatcacaaaaatcgacgctcaagtcagaggtggcgaaacccgacaggactataaagataccaggcgtttccccctggaagctccctcgtgcgctctcctgttccgaccctgccgcttaccggatacctgtccgcctttctcccttcgggaagcgtggcgctttctcatagctcacgctgtaggtatctcagttcggtgtaggtcgttcgctccaagctgggctgtgtgcacgaaccccccgttcagcccgaccgctgcgccttatccggtaactatcgtcttgagtccaacccggtaagacacgacttatcgccactggcagcagccactggtaacaggattagcagagcgaggtatgtaggcggtgctacagagttcttgaagtggtggcctaactacggctacactagaagaacagtatttggtatctgcgctctgctgaagccagttaccttcggaaaaagagttggtagctcttgatccggcaaacaaaccaccgctggtagcggtggtttttttgtttgcaagcagcagattacgcgcagaaaaaaaggatctcaagaagatcctttgatcttttctacggggtctgacgctcagtggaacgaaaactcacgttaagggattttggtcatgagattatcaaaaaggatcttcacctagatccttttaaattaaaaatgaagttttaaatcaatctaaagtatatatgagtaaacttggtctgacagttaccaatgcttaatcagtgaggcacctatctcagcgatctgtctatttcgttcatccatagttgcctgactccccgtcgtgtagataactacgatacgggagggcttaccatctggccccagtgctgcaatgataccgcgagaaccacgctcaccggctccagatttatcagcaataaaccagccagccggaagggccgagcgcagaagtggtcctgcaactttatccgcctccatccagtctattaattgttgccgggaagctagagtaagtagttcgccagttaatagtttgcgcaacgttgttgccattgctacaggcatcgtggtgtcacgctcgtcgtttggtatggcttcattcagctccggttcccaacgatcaaggcgagttacatgatcccccatgttgtgcaaaaaagcggttagctccttcggtcctccgatcgttgtcagaagtaagttggccgcagtgttatcactcatggttatggcagcactgcataattctcttactgtcatgccatccgtaagatgcttttctgtgactggtgagtactcaaccaagtcattctgagaatagtgtatgcggcgaccgagttgctcttgcccggcgtcaatacgggataataccgcgccacatagcagaactttaaaagtgctcatcattggaaaacgttcttcggggcgaaaactctcaaggatcttaccgctgttgagatccagttcgatgtaacccactcgtgcacccaactgatcttcagcatcttttactttcaccagcgtttctgggtgagcaaaaacaggaaggcaaaatgccgcaaaaaagggaataagggcgacacggaaatgttgaatactcatactcttcctttttcaatattattgaagcatttatcagggttattgtctcatgagcggatacatatttgaatgtatttagaaaaataaacaaataggggttccgcgcacatttccccgaaaagtgccac

SEQ ID NO: 126 - DNA, 7416 bp, Artificial Sequence
  Synthetic sequence
ctaaattgtaagcgggtaccatatggtctcatgccaggcctgcgatcgcttgcaaacagaggagatatactaagcctttggaagagtgtatagatgagctagaactctacacacttggtcaatactagatttatctgcatcaaatgctttccaccagggtggattctctgggagaggtacttgaaacctacgtgcagcagcatacacgaccccacaagccagaacctcacttctgaaccttacacaaagggttgtacgcagactatcattagccaaattccaagcttcttgcctcaattccggaggtgtttctagtgttcaacatgacaaacaaaacccatctctttcagtatatgtctctcagttgtgcttaattcaaatttcaactcagagaacttcttggcatacttatccagattatctaatgatctcatctaatggtaattcaactttcagtataagtctcgcagcaaactatctttacatcaaatttttaacaactcaatgcacaaaatacttttcctcaacctaaaaataaggcaattagccaaaaacaactttgcgtgtgaacaacgcgtacacgtccctacacatacctgtcaatttataattggctattgcttccacgccttagctttctcgtgaccgaccgagtcgtcctcgtcttttttgcttctataaatcaaatacccaaagagctcttcttcttcacaattcagattccaattttctcaaactctaaaatcaatctctcaaatctctcaaccgtgatcaaggtagatttctgagttcttattgtatttcttcgatttgtttcgttcgatcgcaatttaggctctgttctttgattttgatctcgttaatctctgatcggaggcaaattacatagtttcatcgttagatctcttcttatttctcgattagggttcgtatttttcgcagatctgtttattttcttgttgtttccttgtatttgatccgatttgttgaaagaatttgtgtgttctcgattatttacgctttgatctgtgatttttatctagatttggtgttagtttcttgtttgtgcgatcgaatttgtcgattaatctcggtttatctgattaacaggtttaaacatggccctgttccaggacttcacccatctctacccactctcaaagaccatgcgcttcgagcttaagccaatcggaaagacccttgagcacatccacgccaagaactttttgtcccaggatgagactatggccgacatgtaccagaaggtgaaggctatcctcgatgactaccacagggatttcattgccgacatgatgggcgaagtgaagcttaccaagctcgccgagttctacgatgtgtacctcaagttccgcaagaacccaaaggatgatggactccagaagcagctcaaggatcttcaggctgtgctgcgcaaagagatcgttaagcctattggaaacggcggcaagtacaaggctggatacgatagacttttcggcgccaagcttttcaaggacggaaaagagcttggcgacctcgctaagttcgtgattgctcaagaaggcgagtcctctccaaagcttgctcatttggctcacttcgagaagttctccacctacttcaccagattccacaagaaccgtaagaacatgtactccgacgaggataagcacaccgctattacctacaggctcatccacgagaacctgccacgcttcattgataacctccagatcctcgctaccatcaagcaaaagcactctgccctctacgaccagatcatcaacgagcttactgcctccggacttgatgtgtctcttgcttctcacctcgacggctaccataagcttttgacccaagagggcattaccgcctacaacactcttctcggaggaatttctggtgaggctggctctaggaagatccagggtattaacgaactcatcaactcccaccacaaccagcactgccataagtctgagaggattgctaagctcaggccactccacaagcagatcctttctgatggaatgggcgtgtccttcctgccatcaaagttcgctgatgactctgagatgtgccaggctgtgaacgagttctataggcactacgctgatgtgttcgccaaggtgcagtctctcttcgatggattcgatgaccaccaaaaggacggcatctacgtcgagcacaagaacctcaacgagttgtccaagcaggctttcggagatttcgctctccttggaagagtgctggatggctactatgtggatgttgtgaaccccgagttcaacgagagattcgctaaggctaagaccgataacgctaaggccaagctcaccaaagagaaggacaagttcatcaagggcgtgcactcactcgcttctctcgaacaagctattgagcactacaccgctaggcacgatgatgagtctgttcaggctggaaagctcggccaatatttcaagcacggacttgctggtgtggacaacccaattcagaagatccacaacaaccactccaccatcaagggattccttgagagagaaagaccagctggcgaaagggctctcccaaagattaagtctggaaagaacccagagatgacccagctcaggcagcttaaagagcttcttgacaacgctcttaacgtggcccacttcgctaagcttctcactaccaagaccactctcgataaccaggacggtaacttctacggtgagttcggtgctctctacgatgagcttgctaagatccccaccttgtacaacaaggtgagggactaccttagccagaagccattctctaccgagaagtacaagctcaacttcggcaacccaaccttgctcaacggatgggatctcaacaaagaaaaggataacttcgggatcatcctccagaaggacggttgctactaccttgctttgctcgataaggcccacaagaaggtgttcgataacgcaccaaacaccggcaagaacgtctaccagaagatgatctacaagctgctccccggaccaaacaagatgcttccaaaggtgttcttcgccaagtccaacctcgactactacaacccttctgctgagctgttggataagtacgctcagggcactcataagaagggcaacaacttcaacctcaaggactgccacgcactcatcgatttcttcaaggccggaatcaacaagcacccagagtggcaacatttcggcttcaagttctccccaaccagctcctaccaggatctctctgatttctacagagaggttgagccacagggctaccaggtgaagttcgtggatatcaacgccgactacatcaacgaacttgttgagcagggacagctctacctcttccagatctataacaaggacttcagccctaaggctcacggcaagccaaaccttcataccctctacttcaaggctctgttctccaaggacaacctcgcaaaccccatctacaagttgaacggcgaggctcagatcttctaccgcaaggcttctcttgacatgaacgagactaccatccacagagctggtgaggtgctcgaaaacaagaaccctgataaccccaagaaacgccagttcgtgtacgacatcatcaaggacaagaggtacacccaggataagttcatgctccacgtgccaatcaccatgaacttcggagttcagggcatgaccatcaaagagttcaacaagaaagtcaaccagagcatccagcagtacgacgaggttaacgtgatcggaattgatagaggtgagaggcaccttctctacctcaccgtgattaactccaagggcgagattctcgagcagcgctcccttaacgatattaccactgcttctgctaacggcacccagatgactactccataccacaagatcctcgacaagcgcgagattgagagactcaacgctagagttggatggggcgagatcgagactatcaaagagcttaagtccggctacctctctcacgttgtgcaccagatttcccagctcatgctcaagtacaacgctatcgtggtgcttgaggaccttaacttcggtttcaagcgcggaaggttcaaggtcgagaagcagatctaccaaaacttcgaaaacgccctcattaagaagctcaaccacctcgttctcaaggatgaggctgatgatgagatcggctcttacaagaacgctctccagctcactaacaactttaccgacctcaagtccatcggaaagcagaccggattcttgttctacgtgccagcttggaacacctccaagatcgatccagagactggattcgtggatctcctcaagccacgctacgagaacattgctcaatcccaggctttcttcggcaagttcgacaagatctgctacaacgctgacaaggactacttcgagttccacatcgactacgccaagttcaccgacaaggcaaagaactccaggcagatatggaagatctgcagtcacggcgacaagcgttacgtgtacgataagactgccaaccagaacaagggtgctaccaagggaatcaacgtgaacgacgagctgaagtcactcttcgctaggcatcacattaacgacaagcagcccaacctcgtgatggacatttgccagaacaacgacaaagaattccacaagtccctgatctacctcctcaagacccttcttgctctcaggtactccaacgcttcctccgatgaggatttcatcttgtccccagtggctaacgatgagggcatgttcttcaactccgctcttgctgatgatacccagccacaaaacgctgatgctaacggtgcttaccacattgctctcaaaggactttgggtcctcgagcagatcaagaactccgatgacctcaacaaggttaagctcgccattgacaaccagacctggttgaacttcgctcagaacaggaaaaggccggcggccacgaaaaaggccggccaggcaaaaaagaaaaagggatcctacccatacgatgttccagattacgcttatccctacgacgtgcctgattatgcatacccatatgatgtccccgactatgccggatccccaaagaaaaagcgcaaggtgtgacggaccgtgacgatcaaccataccagaggcgcgccatatgaagatgaagatgaaatatttggtgtgtcaaataaaaagcttgtgtgcttaagtttgtgtttttttcttggcttgttgtgttatgaatttgtggctttttctaatattaaatgaatgtaagatctcattataatgaataaacaaatgtttctataatccattgtgaatgttttgttggatctcttctgcagcatataactactgtatgtgctatggtatggactatggaatatgattaaagataaggcggccgaacgagaccatatactagtgaattcagtacattaaaaacgtccgcaatgtgttattaagttgtctaagcccgggctgggcctcatgggccttccgctcactgcccgctttccagtcgggaaacctgtcgtgccagctgcattaacatggtcatagctgtttccttgcgtattgggcgctctccgcttcctcgctcactgactcgctgcgctcggtcgttcgggtaaagcctggggtgcctaatgagcaaaaggccagcaaaaggccaggaaccgtaaaaaggccgcgttgctggcgtttttccataggctccgcccccctgacgagcatcacaaaaatcgacgctcaagtcagaggtggcgaaacccgacaggactataaagataccaggcgtttccccctggaagctccctcgtgcgctctcctgttccgaccctgccgcttaccggatacctgtccgcctttctcccttcgggaagcgtggcgctttctcatagctcacgctgtaggtatctcagttcggtgtaggtcgttcgctccaagctgggctgtgtgcacgaaccccccgttcagcccgaccgctgcgccttatccggtaactatcgtcttgagtccaacccggtaagacacgacttatcgccactggcagcagccactggtaacaggattagcagagcgaggtatgtaggcggtgctacagagttcttgaagtggtggcctaactacggctacactagaagaacagtatttggtatctgcgctctgctgaagccagttaccttcggaaaaagagttggtagctcttgatccggcaaacaaaccaccgctggtagcggtggtttttttgtttgcaagcagcagattacgcgcagaaaaaaaggatctcaagaagatcctttgatcttttctacggggtctgacgctcagtggaacgaaaactcacgttaagggattttggtcatgagattatcaaaaaggatcttcacctagatccttttaaattaaaaatgaagttttaaatcaatctaaagtatatatgagtaaacttggtctgacagttaccaatgcttaatcagtgaggcacctatctcagcgatctgtctatttcgttcatccatagttgcctgactccccgtcgtgtagataactacgatacgggagggcttaccatctggccccagtgctgcaatgataccgcgagaaccacgctcaccggctccagatttatcagcaataaaccagccagccggaagggccgagcgcagaagtggtcctgcaactttatccgcctccatccagtctattaattgttgccgggaagctagagtaagtagttcgccagttaatagtttgcgcaacgttgttgccattgctacaggcatcgtggtgtcacgctcgtcgtttggtatggcttcattcagctccggttcccaacgatcaaggcgagttacatgatcccccatgttgtgcaaaaaagcggttagctccttcggtcctccgatcgttgtcagaagtaagttggccgcagtgttatcactcatggttatggcagcactgcataattctcttactgtcatgccatccgtaagatgcttttctgtgactggtgagtactcaaccaagtcattctgagaatagtgtatgcggcgaccgagttgctcttgcccggcgtcaatacgggataataccgcgccacatagcagaactttaaaagtgctcatcattggaaaacgttcttcggggcgaaaactctcaaggatcttaccgctgttgagatccagttcgatgtaacccactcgtgcacccaactgatcttcagcatcttttactttcaccagcgtttctgggtgagcaaaaacaggaaggcaaaatgccgcaaaaaagggaataagggcgacacggaaatgttgaatactcatactcttcctttttcaatattattgaagcatttatcagggttattgtctcatgagcggatacatatttgaatgtatttagaaaaataaacaaataggggttccgcgcacatttccccgaaaagtgccac

SEQ ID NO: 127 - DNA, 7837 bp, Artificial Sequence
  Synthetic sequence
ctaaattgtaagcgttaatattttgttaaaattcgcgttaaatttttgttaaatcagctcattttttaaccaataggccgaaatcggcaaaatcccttataaatcaaaagaatagaccgagatagggttgagtggccgctacagggcgctcccattcgccattcaggctgcgcaactgttgggaagggcgtttcggtgcgggcctcttcgctattacgccagctggcgaaagggggatgtgctgcaaggcgattaagttgggtaacgccagggttttcccagtcacgacgttgtaaaacgacggccagtgagcgcgacgtaatacgactcactatagggcgaattggcggaaggccgtcaaggccgcatcccgggttgtagctccacgcgcttcggcaggggaagctctacttaatcggaagtccatatgtaactataacggtcctaaggtagcgagcgatcgcttgcaaacagaggagatatactaagcctttggaagagtgtatagatgagctagaactctacacacttggtcaatactagatttatctgcatcaaatgctttccaccagggtggattctctgggagaggtacttgaaacctacgtgcagcagcatacacgaccccacaagccagaacctcacttctgaaccttacacaaagggttgtacgcagactatcattagccaaattccaagcttcttgcctcaattccggaggtgtttctagtgttcaacatgacaaacaaaacccatctctttcagtatatgtctctcagttgtgcttaattcaaatttcaactcagagaacttcttggcatacttatccagattatctaatgatctcatctaatggtaattcaactttcagtataagtctcgcagcaaactatctttacatcaaatttttaacaactcaatgcacaaaatacttttcctcaacctaaaaataaggcaattagccaaaaacaactttgcgtgtgaacaacgcgtacacgtccctacacatacctgtcaatttataattggctattgcttccacgccttagctttctcgtgaccgaccgagtcgtcctcgtcttttttgcttctataaatcaaatacccaaagagctcttcttcttcacaattcagattccaattttctcaaactctaaaatcaatctctcaaatctctcaaccgtgatcaaggtagatttctgagttcttattgtatttcttcgatttgtttcgttcgatcgcaatttaggctctgttctttgattttgatctcgttaatctctgatcggaggcaaattacatagtttcatcgttagatctcttcttatttctcgattagggttcgtatttttcgcagatctgtttattttcttgttgtttccttgtatttgatccgatttgttgaaagaatttgtgtgttctcgattatttacgctttgatctgtgatttttatctagatttggtgttagtttcttgtttgtgcgatcgaatttgtcgattaatctcggtttatctgattaacaggtttaaacatggccctgttccaggacttcacccatctctacccactctcaaagaccatgcgcttcgagcttaagccaatcggaaagacccttgagcacatccacgccaagaactttttgtcccaggatgagactatggccgacatgtaccagaaggtgaaggctatcctcgatgactaccacagggatttcattgccgacatgatgggcgaagtgaagcttaccaagctcgccgagttctacgatgtgtacctcaagttccgcaagaacccaaaggatgatggactccagaagcagctcaaggatcttcaggctgtgctgcgcaaagagatcgttaagcctattggaaacggcggcaagtacaaggctggatacgatagacttttcggcgccaagcttttcaaggacggaaaagagcttggcgacctcgctaagttcgtgattgctcaagaaggcgagtcctctccaaagcttgctcatttggctcacttcgagaagttctccacctacttcaccggcttccacagaaaccgtaagcgcatgtactccgacgaggataagcacaccgctattacctacaggctcatccacgagaacctgccacgcttcattgataacctccagatcctcgctaccatcaagcaaaagcactctgccctctacgaccagatcatcaacgagcttactgcctccggacttgatgtgtctcttgcttctcacctcgacggctaccataagcttttgacccaagagggcattaccgcctacaacactcttctcggaggaatttctggtgaggctggctctaggaagatccagggtattaacgaactcatcaactcccaccacaaccagcactgccataagtctgagaggattgctaagctcaggccactccacaagcagatcctttctgatggaatgggcgtgtccttcctgccatcaaagttcgctgatgactctgagatgtgccaggctgtgaacgagttctataggcactacgctgatgtgttcgccaaggtgcagtctctcttcgatggattcgatgaccaccaaaaggacggcatctacgtcgagcacaagaacctcaacgagttgtccaagcaggctttcggagatttcgctctccttggaagagtgctggatggctactatgtggatgttgtgaaccccgagttcaacgagagattcgctaaggctaagaccgataacgctaaggccaagctcaccaaagagaaggacaagttcatcaagggcgtgcactcactcgcttctctcgaacaagctattgagcactacaccgctaggcacgatgatgagtctgttcaggctggaaagctcggccaatatttcaagcacggacttgctggtgtggacaacccaattcagaagatccacaacaaccactccaccatcaagggattccttgagagagaaagaccagctggcgaaagggctctcccaaagattaagtctggaaagaacccagagatgacccagctcaggcagcttaaagagcttcttgacaacgctcttaacgtggcccacttcgctaagcttctcactaccaagaccactctcgataaccaggacggtaacttctacggtgagttcggtgctctctacgatgagcttgctaagatccccaccttgtacaacaaggtgagggactaccttagccagaagccattctctaccgagaagtacaagctcaacttcggcaacccaaccttgctcaacggatgggatctcaacaaagaaaaggataacttcgggatcatcctccagaaggacggttgctactaccttgctttgctcgataaggcccacaagaaggtgttcgataacgcaccaaacaccggcaagaacgtctaccagaagatgatctacaagctgctccccggaccaaacaagatgcttccaaaggtgttcttcgccaagtccaacctcgactactacaacccttctgctgagctgttggataagtacgctcagggcactcataagaagggcaacaacttcaacctcaaggactgccacgcactcatcgatttcttcaaggccggaatcaacaagcacccagagtggcaacatttcggcttcaagttctccccaaccagctcctaccaggatctctctgatttctacagagaggttgagccacagggctaccaggtgaagttcgtggatatcaacgccgactacatcaacgaacttgttgagcagggacagctctacctcttccagatctataacaaggacttcagccctaaggctcacggcaagccaaaccttcataccctctacttcaaggctctgttctccaaggacaacctcgcaaaccccatctacaagttgaacggcgaggctcagatcttctaccgcaaggcttctcttgacatgaacgagactaccatccacagagctggtgaggtgctcgaaaacaagaaccctgataaccccaagaaacgccagttcgtgtacgacatcatcaaggacaagaggtacacccaggataagttcatgctccacgtgccaatcaccatgaacttcggagttcagggcatgaccatcaaagagttcaacaagaaagtcaaccagagcatccagcagtacgacgaggttaacgtgatcggaattgatagaggtgagaggcaccttctctacctcaccgtgattaactccaagggcgagattctcgagcagcgctcccttaacgatattaccactgcttctgctaacggcacccagatgactactccataccacaagatcctcgacaagcgcgagattgagagactcaacgctagagttggatggggcgagatcgagactatcaaagagcttaagtccggctacctctctcacgttgtgcaccagatttcccagctcatgctcaagtacaacgctatcgtggtgcttgaggaccttaacttcggtttcaagcgcggaaggttcaaggtcgagaagcagatctaccaaaacttcgaaaacgccctcattaagaagctcaaccacctcgttctcaaggatgaggctgatgatgagatcggctcttacaagaacgctctccagctcactaacaactttaccgacctcaagtccatcggaaagcagaccggattcttgttctacgtgccagcttggaacacctccaagatcgatccagagactggattcgtggatctcctcaagccacgctacgagaacattgctcaatcccaggctttcttcggcaagttcgacaagatctgctacaacgctgacaaggactacttcgagttccacatcgactacgccaagttcaccgacaaggcaaagaactccaggcagatatggaagatctgcagtcacggcgacaagcgttacgtgtacgataagactgccaaccagaacaagggtgctaccaagggaatcaacgtgaacgacgagctgaagtcactcttcgctaggcatcacattaacgacaagcagcccaacctcgtgatggacatttgccagaacaacgacaaagaattccacaagtccctgatctacctcctcaagacccttcttgctctcaggtactccaacgcttcctccgatgaggatttcatcttgtccccagtggctaacgatgagggcatgttcttcaactccgctcttgctgatgatacccagccacaaaacgctgatgctaacggtgcttaccacattgctctcaaaggactttgggtcctcgagcagatcaagaactccgatgacctcaacaaggttaagctcgccattgacaaccagacctggttgaacttcgctcagaacaggaaaaggccggcggccacgaaaaaggccggccaggcaaaaaagaaaaagggatcctacccatacgatgttccagattacgcttatccctacgacgtgcctgattatgcatacccatatgatgtccccgactatgccggatccccaaagaaaaagcgcaaggtgtgacggaccgtgacgatcaaccataccagaggcgcgccatatgaagatgaagatgaaatatttggtgtgtcaaataaaaagcttgtgtgcttaagtttgtgtttttttcttggcttgttgtgttatgaatttgtggctttttctaatattaaatgaatgtaagatctcattataatgaataaacaaatgtttctataatccattgtgaatgttttgttggatctcttctgcagcatataactactgtatgtgctatggtatggactatggaatatgattaaagataaggcggccgcattaccctgttatccctaaagcttgaattcagtacattaaaaacgtccgcaatgtgttattaagttgtctaagcccgggctgggcctcatgggccttccgctcactgcccgctttccagtcgggaaacctgtcgtgccagctgcattaacatggtcatagctgtttccttgcgtattgggcgctctccgcttcctcgctcactgactcgctgcgctcggtcgttcgggtaaagcctggggtgcctaatgagcaaaaggccagcaaaaggccaggaaccgtaaaaaggccgcgttgctggcgtttttccataggctccgcccccctgacgagcatcacaaaaatcgacgctcaagtcagaggtggcgaaacccgacaggactataaagataccaggcgtttccccctggaagctccctcgtgcgctctcctgttccgaccctgccgcttaccggatacctgtccgcctttctcccttcgggaagcgtggcgctttctcatagctcacgctgtaggtatctcagttcggtgtaggtcgttcgctccaagctgggctgtgtgcacgaaccccccgttcagcccgaccgctgcgccttatccggtaactatcgtcttgagtccaacccggtaagacacgacttatcgccactggcagcagccactggtaacaggattagcagagcgaggtatgtaggcggtgctacagagttcttgaagtggtggcctaactacggctacactagaagaacagtatttggtatctgcgctctgctgaagccagttaccttcggaaaaagagttggtagctcttgatccggcaaacaaaccaccgctggtagcggtggtttttttgtttgcaagcagcagattacgcgcagaaaaaaaggatctcaagaagatcctttgatcttttctacggggtctgacgctcagtggaacgaaaactcacgttaagggattttggtcatgagattatcaaaaaggatcttcacctagatccttttaaattaaaaatgaagttttaaatcaatctaaagtatatatgagtaaacttggtctgacagttaccaatgcttaatcagtgaggcacctatctcagcgatctgtctatttcgttcatccatagttgcctgactccccgtcgtgtagataactacgatacgggagggcttaccatctggccccagtgctgcaatgataccgcgagaaccacgctcaccggctccagatttatcagcaataaaccagccagccggaagggccgagcgcagaagtggtcctgcaactttatccgcctccatccagtctattaattgttgccgggaagctagagtaagtagttcgccagttaatagtttgcgcaacgttgttgccattgctacaggcatcgtggtgtcacgctcgtcgtttggtatggcttcattcagctccggttcccaacgatcaaggcgagttacatgatcccccatgttgtgcaaaaaagcggttagctccttcggtcctccgatcgttgtcagaagtaagttggccgcagtgttatcactcatggttatggcagcactgcataattctcttactgtcatgccatccgtaagatgcttttctgtgactggtgagtactcaaccaagtcattctgagaatagtgtatgcggcgaccgagttgctcttgcccggcgtcaatacgggataataccgcgccacatagcagaactttaaaagtgctcatcattggaaaacgttcttcggggcgaaaactctcaaggatcttaccgctgttgagatccagttcgatgtaacccactcgtgcacccaactgatcttcagcatcttttactttcaccagcgtttctgggtgagcaaaaacaggaaggcaaaatgccgcaaaaaagggaataagggcgacacggaaatgttgaatactcatactcttcctttttcaatattattgaagcatttatcagggttattgtctcatgagcggatacatatttgaatgtatttagaaaaataaacaaataggggttccgcgcacatttccccgaaaagtgccac

SEQ ID NO: 128 - DNA, 7416 bp, Artificial Sequence
  Synthetic sequence
ctaaattgtaagcgggtaccatatggtctcatgccaggcctgcgatcgcttgcaaacagaggagatatactaagcctttggaagagtgtatagatgagctagaactctacacacttggtcaatactagatttatctgcatcaaatgctttccaccagggtggattctctgggagaggtacttgaaacctacgtgcagcagcatacacgaccccacaagccagaacctcacttctgaaccttacacaaagggttgtacgcagactatcattagccaaattccaagcttcttgcctcaattccggaggtgtttctagtgttcaacatgacaaacaaaacccatctctttcagtatatgtctctcagttgtgcttaattcaaatttcaactcagagaacttcttggcatacttatccagattatctaatgatctcatctaatggtaattcaactttcagtataagtctcgcagcaaactatctttacatcaaatttttaacaactcaatgcacaaaatacttttcctcaacctaaaaataaggcaattagccaaaaacaactttgcgtgtgaacaacgcgtacacgtccctacacatacctgtcaatttataattggctattgcttccacgccttagctttctcgtgaccgaccgagtcgtcctcgtcttttttgcttctataaatcaaatacccaaagagctcttcttcttcacaattcagattccaattttctcaaactctaaaatcaatctctcaaatctctcaaccgtgatcaaggtagatttctgagttcttattgtatttcttcgatttgtttcgttcgatcgcaatttaggctctgttctttgattttgatctcgttaatctctgatcggaggcaaattacatagtttcatcgttagatctcttcttatttctcgattagggttcgtatttttcgcagatctgtttattttcttgttgtttccttgtatttgatccgatttgttgaaagaatttgtgtgttctcgattatttacgctttgatctgtgatttttatctagatttggtgttagtttcttgtttgtgcgatcgaatttgtcgattaatctcggtttatctgattaacaggtttaaacatggccctgttccaggacttcacccatctctacccactctcaaagaccatgcgcttcgagcttaagccaatcggaaagacccttgagcacatccacgccaagaactttttgtcccaggatgagactatggccgacatgtaccagaaggtgaaggctatcctcgatgactaccacagggatttcattgccgacatgatgggcgaagtgaagcttaccaagctcgccgagttctacgatgtgtacctcaagttccgcaagaacccaaaggatgatggactccagaagcagctcaaggatcttcaggctgtgctgcgcaaagagatcgttaagcctattggaaacggcggcaagtacaaggctggatacgatagacttttcggcgccaagcttttcaaggacggaaaagagcttggcgacctcgctaagttcgtgattgctcaagaaggcgagtcctctccaaagcttgctcatttggctcacttcgagaagttctccacctacttcaccagattccacagaaaccgtaagaacatgtactccgacgaggataagcacaccgctattacctacaggctcatccacgagaacctgccacgcttcattgataacctccagatcctcgctaccatcaagcaaaagcactctgccctctacgaccagatcatcaacgagcttactgcctccggacttgatgtgtctcttgcttctcacctcgacggctaccataagcttttgacccaagagggcattaccgcctacaacactcttctcggaggaatttctggtgaggctggctctaggaagatccagggtattaacgaactcatcaactcccaccacaaccagcactgccataagtctgagaggattgctaagctcaggccactccacaagcagatcctttctgatggaatgggcgtgtccttcctgccatcaaagttcgctgatgactctgagatgtgccaggctgtgaacgagttctataggcactacgctgatgtgttcgccaaggtgcagtctctcttcgatggattcgatgaccaccaaaaggacggcatctacgtcgagcacaagaacctcaacgagttgtccaagcaggctttcggagatttcgctctccttggaagagtgctggatggctactatgtggatgttgtgaaccccgagttcaacgagagattcgctaaggctaagaccgataacgctaaggccaagctcaccaaagagaaggacaagttcatcaagggcgtgcactcactcgcttctctcgaacaagctattgagcactacaccgctaggcacgatgatgagtctgttcaggctggaaagctcggccaatatttcaagcacggacttgctggtgtggacaacccaattcagaagatccacaacaaccactccaccatcaagggattccttgagagagaaagaccagctggcgaaagggctctcccaaagattaagtctggaaagaacccagagatgacccagctcaggcagcttaaagagcttcttgacaacgctcttaacgtggcccacttcgctaagcttctcactaccaagaccactctcgataaccaggacggtaacttctacggtgagttcggtgctctctacgatgagcttgctaagatccccaccttgtacaacaaggtgagggactaccttagccagaagccattctctaccgagaagtacaagctcaacttcggcaacccaaccttgctcaacggatgggatctcaacaaagaaaaggataacttcgggatcatcctccagaaggacggttgctactaccttgctttgctcgataaggcccacaagaaggtgttcgataacgcaccaaacaccggcaagaacgtctaccagaagatgatctacaagctgctccccggaccaaacaagatgcttccaaaggtgttcttcgccaagtccaacctcgactactacaacccttctgctgagctgttggataagtacgctcagggcactcataagaagggcaacaacttcaacctcaaggactgccacgcactcatcgatttcttcaaggccggaatcaacaagcacccagagtggcaacatttcggcttcaagttctccccaaccagctcctaccaggatctctctgatttctacagagaggttgagccacagggctaccaggtgaagttcgtggatatcaacgccgactacatcaacgaacttgttgagcagggacagctctacctcttccagatctataacaaggacttcagccctaaggctcacggcaagccaaaccttcataccctctacttcaaggctctgttctccaaggacaacctcgcaaaccccatctacaagttgaacggcgaggctcagatcttctaccgcaaggcttctcttgacatgaacgagactaccatccacagagctggtgaggtgctcgaaaacaagaaccctgataaccccaagaaacgccagttcgtgtacgacatcatcaaggacaagaggtacacccaggataagttcatgctccacgtgccaatcaccatgaacttcggagttcagggcatgaccatcaaagagttcaacaagaaagtcaaccagagcatccagcagtacgacgaggttaacgtgatcggaattgatagaggtgagaggcaccttctctacctcaccgtgattaactccaagggcgagattctcgagcagcgctcccttaacgatattaccactgcttctgctaacggcacccagatgactactccataccacaagatcctcgacaagcgcgagattgagagactcaacgctagagttggatggggcgagatcgagactatcaaagagcttaagtccggctacctctctcacgttgtgcaccagatttcccagctcatgctcaagtacaacgctatcgtggtgcttgaggaccttaacttcggtttcaagcgcggaaggttcaaggtcgagaagcagatctaccaaaacttcgaaaacgccctcattaagaagctcaaccacctcgttctcaaggatgaggctgatgatgagatcggctcttacaagaacgctctccagctcactaacaactttaccgacctcaagtccatcggaaagcagaccggattcttgttctacgtgccagcttggaacacctccaagatcgatccagagactggattcgtggatctcctcaagccacgctacgagaacattgctcaatcccaggctttcttcggcaagttcgacaagatctgctacaacgctgacaaggactacttcgagttccacatcgactacgccaagttcaccgacaaggcaaagaactccaggcagatatggaagatctgcagtcacggcgacaagcgttacgtgtacgataagactgccaaccagaacaagggtgctaccaagggaatcaacgtgaacgacgagctgaagtcactcttcgctaggcatcacattaacgacaagcagcccaacctcgtgatggacatttgccagaacaacgacaaagaattccacaagtccctgatctacctcctcaagacccttcttgctctcaggtactccaacgcttcctccgatgaggatttcatcttgtccccagtggctaacgatgagggcatgttcttcaactccgctcttgctgatgatacccagccacaaaacgctgatgctaacggtgcttaccacattgctctcaaaggactttgggtcctcgagcagatcaagaactccgatgacctcaacaaggttaagctcgccattgacaaccagacctggttgaacttcgctcagaacaggaaaaggccggcggccacgaaaaaggccggccaggcaaaaaagaaaaagggatcctacccatacgatgttccagattacgcttatccctacgacgtgcctgattatgcatacccatatgatgtccccgactatgccggatccccaaagaaaaagcgcaaggtgtgacggaccgtgacgatcaaccataccagaggcgcgccatatgaagatgaagatgaaatatttggtgtgtcaaataaaaagcttgtgtgcttaagtttgtgtttttttcttggcttgttgtgttatgaatttgtggctttttctaatattaaatgaatgtaagatctcattataatgaataaacaaatgtttctataatccattgtgaatgttttgttggatctcttctgcagcatataactactgtatgtgctatggtatggactatggaatatgattaaagataaggcggccgaacgagaccatatactagtgaattcagtacattaaaaacgtccgcaatgtgttattaagttgtctaagcccgggctgggcctcatgggccttccgctcactgcccgctttccagtcgggaaacctgtcgtgccagctgcattaacatggtcatagctgtttccttgcgtattgggcgctctccgcttcctcgctcactgactcgctgcgctcggtcgttcgggtaaagcctggggtgcctaatgagcaaaaggccagcaaaaggccaggaaccgtaaaaaggccgcgttgctggcgtttttccataggctccgcccccctgacgagcatcacaaaaatcgacgctcaagtcagaggtggcgaaacccgacaggactataaagataccaggcgtttccccctggaagctccctcgtgcgctctcctgttccgaccctgccgcttaccggatacctgtccgcctttctcccttcgggaagcgtggcgctttctcatagctcacgctgtaggtatctcagttcggtgtaggtcgttcgctccaagctgggctgtgtgcacgaaccccccgttcagcccgaccgctgcgccttatccggtaactatcgtcttgagtccaacccggtaagacacgacttatcgccactggcagcagccactggtaacaggattagcagagcgaggtatgtaggcggtgctacagagttcttgaagtggtggcctaactacggctacactagaagaacagtatttggtatctgcgctctgctgaagccagttaccttcggaaaaagagttggtagctcttgatccggcaaacaaaccaccgctggtagcggtggtttttttgtttgcaagcagcagattacgcgcagaaaaaaaggatctcaagaagatcctttgatcttttctacggggtctgacgctcagtggaacgaaaactcacgttaagggattttggtcatgagattatcaaaaaggatcttcacctagatccttttaaattaaaaatgaagttttaaatcaatctaaagtatatatgagtaaacttggtctgacagttaccaatgcttaatcagtgaggcacctatctcagcgatctgtctatttcgttcatccatagttgcctgactccccgtcgtgtagataactacgatacgggagggcttaccatctggccccagtgctgcaatgataccgcgagaaccacgctcaccggctccagatttatcagcaataaaccagccagccggaagggccgagcgcagaagtggtcctgcaactttatccgcctccatccagtctattaattgttgccgggaagctagagtaagtagttcgccagttaatagtttgcgcaacgttgttgccattgctacaggcatcgtggtgtcacgctcgtcgtttggtatggcttcattcagctccggttcccaacgatcaaggcgagttacatgatcccccatgttgtgcaaaaaagcggttagctccttcggtcctccgatcgttgtcagaagtaagttggccgcagtgttatcactcatggttatggcagcactgcataattctcttactgtcatgccatccgtaagatgcttttctgtgactggtgagtactcaaccaagtcattctgagaatagtgtatgcggcgaccgagttgctcttgcccggcgtcaatacgggataataccgcgccacatagcagaactttaaaagtgctcatcattggaaaacgttcttcggggcgaaaactctcaaggatcttaccgctgttgagatccagttcgatgtaacccactcgtgcacccaactgatcttcagcatcttttactttcaccagcgtttctgggtgagcaaaaacaggaaggcaaaatgccgcaaaaaagggaataagggcgacacggaaatgttgaatactcatactcttcctttttcaatattattgaagcatttatcagggttattgtctcatgagcggatacatatttgaatgtatttagaaaaataaacaaataggggttccgcgcacatttccccgaaaagtgccac

SEQ ID NO: 129 - DNA, 7416 bp, Artificial Sequence
  Synthetic sequence
ctaaattgtaagcgggtaccatatggtctcatgccaggcctgcgatcgcttgcaaacagaggagatatactaagcctttggaagagtgtatagatgagctagaactctacacacttggtcaatactagatttatctgcatcaaatgctttccaccagggtggattctctgggagaggtacttgaaacctacgtgcagcagcatacacgaccccacaagccagaacctcacttctgaaccttacacaaagggttgtacgcagactatcattagccaaattccaagcttcttgcctcaattccggaggtgtttctagtgttcaacatgacaaacaaaacccatctctttcagtatatgtctctcagttgtgcttaattcaaatttcaactcagagaacttcttggcatacttatccagattatctaatgatctcatctaatggtaattcaactttcagtataagtctcgcagcaaactatctttacatcaaatttttaacaactcaatgcacaaaatacttttcctcaacctaaaaataaggcaattagccaaaaacaactttgcgtgtgaacaacgcgtacacgtccctacacatacctgtcaatttataattggctattgcttccacgccttagctttctcgtgaccgaccgagtcgtcctcgtcttttttgcttctataaatcaaatacccaaagagctcttcttcttcacaattcagattccaattttctcaaactctaaaatcaatctctcaaatctctcaaccgtgatcaaggtagatttctgagttcttattgtatttcttcgatttgtttcgttcgatcgcaatttaggctctgttctttgattttgatctcgttaatctctgatcggaggcaaattacatagtttcatcgttagatctcttcttatttctcgattagggttcgtatttttcgcagatctgtttattttcttgttgtttccttgtatttgatccgatttgttgaaagaatttgtgtgttctcgattatttacgctttgatctgtgatttttatctagatttggtgttagtttcttgtttgtgcgatcgaatttgtcgattaatctcggtttatctgattaacaggtttaaacatggccctgttccaggacttcacccatctctacccactctcaaagaccatgcgcttcgagcttaagccaatcggaaagacccttgagcacatccacgccaagaactttttgtcccaggatgagactatggccgacatgtaccagaaggtgaaggctatcctcgatgactaccacagggatttcattgccgacatgatgggcgaagtgaagcttaccaagctcgccgagttctacgatgtgtacctcaagttccgcaagaacccaaaggatgatggactccagaagcagctcaaggatcttcaggctgtgctgcgcaaagagatcgttaagcctattggaaacggcggcaagtacaaggctggatacgatagacttttcggcgccaagcttttcaaggacggaaaagagcttggcgacctcgctaagttcgtgattgctcaagaaggcgagtcctctccaaagcttgctcatttggctcacttcgagaagttctccacctacttcaccggcttccaccataaccgtaagaacatgtactccgacgaggataagcacaccgctattacctacaggctcatccacgagaacctgccacgcttcattgataacctccagatcctcgctaccatcaagcaaaagcactctgccctctacgaccagatcatcaacgagcttactgcctccggacttgatgtgtctcttgcttctcacctcgacggctaccataagcttttgacccaagagggcattaccgcctacaacactcttctcggaggaatttctggtgaggctggctctaggaagatccagggtattaacgaactcatcaactcccaccacaaccagcactgccataagtctgagaggattgctaagctcaggccactccacaagcagatcctttctgatggaatgggcgtgtccttcctgccatcaaagttcgctgatgactctgagatgtgccaggctgtgaacgagttctataggcactacgctgatgtgttcgccaaggtgcagtctctcttcgatggattcgatgaccaccaaaaggacggcatctacgtcgagcacaagaacctcaacgagttgtccaagcaggctttcggagatttcgctctccttggaagagtgctggatggctactatgtggatgttgtgaaccccgagttcaacgagagattcgctaaggctaagaccgataacgctaaggccaagctcaccaaagagaaggacaagttcatcaagggcgtgcactcactcgcttctctcgaacaagctattgagcactacaccgctaggcacgatgatgagtctgttcaggctggaaagctcggccaatatttcaagcacggacttgctggtgtggacaacccaattcagaagatccacaacaaccactccaccatcaagggattccttgagagagaaagaccagctggcgaaagggctctcccaaagattaagtctggaaagaacccagagatgacccagctcaggcagcttaaagagcttcttgacaacgctcttaacgtggcccacttcgctaagcttctcactaccaagaccactctcgataaccaggacggtaacttctacggtgagttcggtgctctctacgatgagcttgctaagatccccaccttgtacaacaaggtgagggactaccttagccagaagccattctctaccgagaagtacaagctcaacttcggcaacccaaccttgctcaacggatgggatctcaacaaagaaaaggataacttcgggatcatcctccagaaggacggttgctactaccttgctttgctcgataaggcccacaagaaggtgttcgataacgcaccaaacaccggcaagaacgtctaccagaagatgatctacaagctgctccccggaccaaacaagatgcttccaaaggtgttcttcgccaagtccaacctcgactactacaacccttctgctgagctgttggataagtacgctcagggcactcataagaagggcaacaacttcaacctcaaggactgccacgcactcatcgatttcttcaaggccggaatcaacaagcacccagagtggcaacatttcggcttcaagttctccccaaccagctcctaccaggatctctctgatttctacagagaggttgagccacagggctaccaggtgaagttcgtggatatcaacgccgactacatcaacgaacttgttgagcagggacagctctacctcttccagatctataacaaggacttcagccctaaggctcacggcaagccaaaccttcataccctctacttcaaggctctgttctccaaggacaacctcgcaaaccccatctacaagttgaacggcgaggctcagatcttctaccgcaaggcttctcttgacatgaacgagactaccatccacagagctggtgaggtgctcgaaaacaagaaccctgataaccccaagaaacgccagttcgtgtacgacatcatcaaggacaagaggtacacccaggataagttcatgctccacgtgccaatcaccatgaacttcggagttcagggcatgaccatcaaagagttcaacaagaaagtcaaccagagcatccagcagtacgacgaggttaacgtgatcggaattgatagaggtgagaggcaccttctctacctcaccgtgattaactccaagggcgagattctcgagcagcgctcccttaacgatattaccactgcttctgctaacggcacccagatgactactccataccacaagatcctcgacaagcgcgagattgagagactcaacgctagagttggatggggcgagatcgagactatcaaagagcttaagtccggctacctctctcacgttgtgcaccagatttcccagctcatgctcaagtacaacgctatcgtggtgcttgaggaccttaacttcggtttcaagcgcggaaggttcaaggtcgagaagcagatctaccaaaacttcgaaaacgccctcattaagaagctcaaccacctcgttctcaaggatgaggctgatgatgagatcggctcttacaagaacgctctccagctcactaacaactttaccgacctcaagtccatcggaaagcagaccggattcttgttctacgtgccagcttggaacacctccaagatcgatccagagactggattcgtggatctcctcaagccacgctacgagaacattgctcaatcccaggctttcttcggcaagttcgacaagatctgctacaacgctgacaaggactacttcgagttccacatcgactacgccaagttcaccgacaaggcaaagaactccaggcagatatggaagatctgcagtcacggcgacaagcgttacgtgtacgataagactgccaaccagaacaagggtgctaccaagggaatcaacgtgaacgacgagctgaagtcactcttcgctaggcatcacattaacgacaagcagcccaacctcgtgatggacatttgccagaacaacgacaaagaattccacaagtccctgatctacctcctcaagacccttcttgctctcaggtactccaacgcttcctccgatgaggatttcatcttgtccccagtggctaacgatgagggcatgttcttcaactccgctcttgctgatgatacccagccacaaaacgctgatgctaacggtgcttaccacattgctctcaaaggactttgggtcctcgagcagatcaagaactccgatgacctcaacaaggttaagctcgccattgacaaccagacctggttgaacttcgctcagaacaggaaaaggccggcggccacgaaaaaggccggccaggcaaaaaagaaaaagggatcctacccatacgatgttccagattacgcttatccctacgacgtgcctgattatgcatacccatatgatgtccccgactatgccggatccccaaagaaaaagcgcaaggtgtgacggaccgtgacgatcaaccataccagaggcgcgccatatgaagatgaagatgaaatatttggtgtgtcaaataaaaagcttgtgtgcttaagtttgtgtttttttcttggcttgttgtgttatgaatttgtggctttttctaatattaaatgaatgtaagatctcattataatgaataaacaaatgtttctataatccattgtgaatgttttgttggatctcttctgcagcatataactactgtatgtgctatggtatggactatggaatatgattaaagataaggcggccgaacgagaccatatactagtgaattcagtacattaaaaacgtccgcaatgtgttattaagttgtctaagcccgggctgggcctcatgggccttccgctcactgcccgctttccagtcgggaaacctgtcgtgccagctgcattaacatggtcatagctgtttccttgcgtattgggcgctctccgcttcctcgctcactgactcgctgcgctcggtcgttcgggtaaagcctggggtgcctaatgagcaaaaggccagcaaaaggccaggaaccgtaaaaaggccgcgttgctggcgtttttccataggctccgcccccctgacgagcatcacaaaaatcgacgctcaagtcagaggtggcgaaacccgacaggactataaagataccaggcgtttccccctggaagctccctcgtgcgctctcctgttccgaccctgccgcttaccggatacctgtccgcctttctcccttcgggaagcgtggcgctttctcatagctcacgctgtaggtatctcagttcggtgtaggtcgttcgctccaagctgggctgtgtgcacgaaccccccgttcagcccgaccgctgcgccttatccggtaactatcgtcttgagtccaacccggtaagacacgacttatcgccactggcagcagccactggtaacaggattagcagagcgaggtatgtaggcggtgctacagagttcttgaagtggtggcctaactacggctacactagaagaacagtatttggtatctgcgctctgctgaagccagttaccttcggaaaaagagttggtagctcttgatccggcaaacaaaccaccgctggtagcggtggtttttttgtttgcaagcagcagattacgcgcagaaaaaaaggatctcaagaagatcctttgatcttttctacggggtctgacgctcagtggaacgaaaactcacgttaagggattttggtcatgagattatcaaaaaggatcttcacctagatccttttaaattaaaaatgaagttttaaatcaatctaaagtatatatgagtaaacttggtctgacagttaccaatgcttaatcagtgaggcacctatctcagcgatctgtctatttcgttcatccatagttgcctgactccccgtcgtgtagataactacgatacgggagggcttaccatctggccccagtgctgcaatgataccgcgagaaccacgctcaccggctccagatttatcagcaataaaccagccagccggaagggccgagcgcagaagtggtcctgcaactttatccgcctccatccagtctattaattgttgccgggaagctagagtaagtagttcgccagttaatagtttgcgcaacgttgttgccattgctacaggcatcgtggtgtcacgctcgtcgtttggtatggcttcattcagctccggttcccaacgatcaaggcgagttacatgatcccccatgttgtgcaaaaaagcggttagctccttcggtcctccgatcgttgtcagaagtaagttggccgcagtgttatcactcatggttatggcagcactgcataattctcttactgtcatgccatccgtaagatgcttttctgtgactggtgagtactcaaccaagtcattctgagaatagtgtatgcggcgaccgagttgctcttgcccggcgtcaatacgggataataccgcgccacatagcagaactttaaaagtgctcatcattggaaaacgttcttcggggcgaaaactctcaaggatcttaccgctgttgagatccagttcgatgtaacccactcgtgcacccaactgatcttcagcatcttttactttcaccagcgtttctgggtgagcaaaaacaggaaggcaaaatgccgcaaaaaagggaataagggcgacacggaaatgttgaatactcatactcttcctttttcaatattattgaagcatttatcagggttattgtctcatgagcggatacatatttgaatgtatttagaaaaataaacaaataggggttccgcgcacatttccccgaaaagtgccac

SEQ ID NO: 130 - DNA, 7416 bp, Artificial Sequence
  Synthetic sequence
ctaaattgtaagcgggtaccatatggtctcatgccaggcctgcgatcgcttgcaaacagaggagatatactaagcctttggaagagtgtatagatgagctagaactctacacacttggtcaatactagatttatctgcatcaaatgctttccaccagggtggattctctgggagaggtacttgaaacctacgtgcagcagcatacacgaccccacaagccagaacctcacttctgaaccttacacaaagggttgtacgcagactatcattagccaaattccaagcttcttgcctcaattccggaggtgtttctagtgttcaacatgacaaacaaaacccatctctttcagtatatgtctctcagttgtgcttaattcaaatttcaactcagagaacttcttggcatacttatccagattatctaatgatctcatctaatggtaattcaactttcagtataagtctcgcagcaaactatctttacatcaaatttttaacaactcaatgcacaaaatacttttcctcaacctaaaaataaggcaattagccaaaaacaactttgcgtgtgaacaacgcgtacacgtccctacacatacctgtcaatttataattggctattgcttccacgccttagctttctcgtgaccgaccgagtcgtcctcgtcttttttgcttctataaatcaaatacccaaagagctcttcttcttcacaattcagattccaattttctcaaactctaaaatcaatctctcaaatctctcaaccgtgatcaaggtagatttctgagttcttattgtatttcttcgatttgtttcgttcgatcgcaatttaggctctgttctttgattttgatctcgttaatctctgatcggaggcaaattacatagtttcatcgttagatctcttcttatttctcgattagggttcgtatttttcgcagatctgtttattttcttgttgtttccttgtatttgatccgatttgttgaaagaatttgtgtgttctcgattatttacgctttgatctgtgatttttatctagatttggtgttagtttcttgtttgtgcgatcgaatttgtcgattaatctcggtttatctgattaacaggtttaaacatggccctgttccaggacttcacccatctctacccactctcaaagaccatgcgcttcgagcttaagccaatcggaaagacccttgagcacatccacgccaagaactttttgtcccaggatgagactatggccgacatgtaccagaaggtgaaggctatcctcgatgactaccacagggatttcattgccgacatgatgggcgaagtgaagcttaccaagctcgccgagttctacgatgtgtacctcaagttccgcaagaacccaaaggatgatggactccagaagcagctcaaggatcttcaggctgtgctgcgcaaagagatcgttaagcctattggaaacggcggcaagtacaaggctggatacgatagacttttcggcgccaagcttttcaaggacggaaaagagcttggcgacctcgctaagttcgtgattgctcaagaaggcgagtcctctccaaagcttgctcatttggctcacttcgagaagttctccacctacttcaccggcttccacaagaaccgtaagaacatgtactccgacgaggataagcacaccgctattacctacaggctcatccacgagaacctgccacgcttcattgataacctccagatcctcgctaccatcaagcaaaagcactctgccctctacgaccagatcatcaacgagcttactgcctccggacttgatgtgtctcttgcttctcacctcgacggctaccataagcttttgacccaagagggcattaccgcctacaacactcttctcggaggaatttctggtgaggctggctctaggaagatccagggtattaacgaactcatcaactcccaccacaaccagcactgccataagtctgagaggattgctaagctcaggccactccacaagcagatcctttctgatggaatgggcgtgtccttcctgccatcaaagttcgctgatgactctgagatgtgccaggctgtgaacgagttctataggcactacgctgatgtgttcgccaaggtgcagtctctcttcgatggattcgatgaccaccaaaaggacggcatctacgtcgagcacaagaacctcaacgagttgtccaagcaggctttcggagatttcgctctccttggaagagtgctggatggctactatgtggatgttgtgaaccccgagttcaacgagagattcgctaaggctaagaccgataacgctaaggccaagctcaccaaagagaaggacaagttcatcaagggcgtgcactcactcgcttctctcgaacaagctattgagcactacaccgctaggcacgatgatgagtctgttcaggctggaaagctcggccaatatttcaagcacggacttgctggtgtggacaacccaattcagaagatccacaacaaccactccaccatcaagggattccttgagagagaaagaccagctggcgaaagggctctcccaaagattaagtctggaaagaacccagagatgacccagctcaggcagcttaaagagcttcttgacaacgctcttaacgtggcccacttcgctaagcttctcactaccaagaccactctcgataaccaggacggtaacttctacggtgagttcggtgctctctacgatgagcttgctaagatccccaccttgtacaacaaggtgagggactaccttagccagaagccattctctaccgagaagtacaagctcaacttcggcaacccaaccttgctcaacggatgggatctcaacaaagaaaaggataacttcgggatcatcctccagaaggacggttgctactaccttgctttgctcgataaggcccacaagaaggtgttcgataacgcaccaaacaccggcaagaacgtctaccagaagatgatctacaagctgctccccggaccaaacaagatgcttccaaaggtgttcttcgccaagtccaacctcgactactacaacccttctgctgagctgttggataagtacgctcagggcactcataagaagggcaacaacttcaacctcaaggactgccacgcactcatcgatttcttcaaggccggaatcaacaagcacccagagtggcaacatttcggcttcaagttctccccaaccagctcctaccaggatctctctgatttctacagagaggttgagccacagggctaccaggtgaagttcgtggatatcaacgccgactacatcaacgaacttgttgagcagggacagctctacctcttccagatctataacaaggacttcagccctaaggctcacggcaagccaaaccttcataccctctacttcaaggctctgttctccaaggacaacctcgcaaaccccatctacaagttgaacggcgaggctcagatcttctaccgcaaggcttctcttgacatgaacgagactaccatccacagagctggtgaggtgctcgaaaacaagaaccctgataaccccaagaaacgccagttcgtgtacgacatcatcaaggacaagaggtacacccaggataagttcatgctccacgtgccaatcaccatgaacttcggagttcagggcatgaccatcaaagagttcaacaagaaagtcaaccagagcatccagcagtacgacgaggttaacgtgatcggaattgatagaggtgagaggcaccttctctacctcaccgtgattaactccaagggcgagattctcgagcagcgctcccttaacgatattaccactgcttctgctaacggcacccagatgactactccataccacaagatcctcgacaagcgcgagattgagagactcaacgctagagttggatggggcgagatcgagactatcaaagagcttaagtccggctacctctctcacgttgtgcaccagatttcccagctcatgctcaagtacaacgctatcgtggtgcttgaggaccttaacttcggtttcaagcgcggaaggttcaaggtcgagaagcagatctaccaaaacttcgaaaacgccctcattaagaagctcaaccacctcgttctcaaggatgaggctgatgatgagatcggctcttacaagaacgctctccagctcactaacaactttaccgacctcaagtccatcggaaagcagaccggattcttgttctacgtgccagcttggaacacctccaagatcgatccagagactggattcgtggatctcctcaagccacgctacgagaacattgctcaatcccaggctttcttcggcaagttcgacaagatctgctacaacgctgacaaggactacttcgagttccacatcgactacgccaagttcaccgacaaggcaaagaactccaggcagatatggaagatctgcagtcacggcgacaagcgttacgtgtacgataagactgccaaccagaacaagggtgctaccaagggaatcaacgtgaacgacgagctgaagtcactcttcgctaggcatcacattaacgacaagcagcccaacctcgtgatggacatttgccagaacaacgacaaagaattccacaagtccctgatctacctcctcaagacccttcttgctctcaggtactccaacgcttcctccgatgaggatttcatcttgtccccagtggctaacgatgagggcatgttcttcaactccgctcttgctgatgatacccagccacaaaacgctgatgctaacggtgcttaccacattgctctcaaaggactttgggtcctcgagcagatcaagaactccgatgacctcaacaaggttaagctcgccattgacaaccagacctggttgaacttcgctcagaacaggaaaaggccggcggccacgaaaaaggccggccaggcaaaaaagaaaaagggatcctacccatacgatgttccagattacgcttatccctacgacgtgcctgattatgcatacccatatgatgtccccgactatgccggatccccaaagaaaaagcgcaaggtgtgacggaccgtgacgatcaaccataccagaggcgcgccatatgaagatgaagatgaaatatttggtgtgtcaaataaaaagcttgtgtgcttaagtttgtgtttttttcttggcttgttgtgttatgaatttgtggctttttctaatattaaatgaatgtaagatctcattataatgaataaacaaatgtttctataatccattgtgaatgttttgttggatctcttctgcagcatataactactgtatgtgctatggtatggactatggaatatgattaaagataaggcggccgaacgagaccatatactagtgaattcagtacattaaaaacgtccgcaatgtgttattaagttgtctaagcccgggctgggcctcatgggccttccgctcactgcccgctttccagtcgggaaacctgtcgtgccagctgcattaacatggtcatagctgtttccttgcgtattgggcgctctccgcttcctcgctcactgactcgctgcgctcggtcgttcgggtaaagcctggggtgcctaatgagcaaaaggccagcaaaaggccaggaaccgtaaaaaggccgcgttgctggcgtttttccataggctccgcccccctgacgagcatcacaaaaatcgacgctcaagtcagaggtggcgaaacccgacaggactataaagataccaggcgtttccccctggaagctccctcgtgcgctctcctgttccgaccctgccgcttaccggatacctgtccgcctttctcccttcgggaagcgtggcgctttctcatagctcacgctgtaggtatctcagttcggtgtaggtcgttcgctccaagctgggctgtgtgcacgaaccccccgttcagcccgaccgctgcgccttatccggtaactatcgtcttgagtccaacccggtaagacacgacttatcgccactggcagcagccactggtaacaggattagcagagcgaggtatgtaggcggtgctacagagttcttgaagtggtggcctaactacggctacactagaagaacagtatttggtatctgcgctctgctgaagccagttaccttcggaaaaagagttggtagctcttgatccggcaaacaaaccaccgctggtagcggtggtttttttgtttgcaagcagcagattacgcgcagaaaaaaaggatctcaagaagatcctttgatcttttctacggggtctgacgctcagtggaacgaaaactcacgttaagggattttggtcatgagattatcaaaaaggatcttcacctagatccttttaaattaaaaatgaagttttaaatcaatctaaagtatatatgagtaaacttggtctgacagttaccaatgcttaatcagtgaggcacctatctcagcgatctgtctatttcgttcatccatagttgcctgactccccgtcgtgtagataactacgatacgggagggcttaccatctggccccagtgctgcaatgataccgcgagaaccacgctcaccggctccagatttatcagcaataaaccagccagccggaagggccgagcgcagaagtggtcctgcaactttatccgcctccatccagtctattaattgttgccgggaagctagagtaagtagttcgccagttaatagtttgcgcaacgttgttgccattgctacaggcatcgtggtgtcacgctcgtcgtttggtatggcttcattcagctccggttcccaacgatcaaggcgagttacatgatcccccatgttgtgcaaaaaagcggttagctccttcggtcctccgatcgttgtcagaagtaagttggccgcagtgttatcactcatggttatggcagcactgcataattctcttactgtcatgccatccgtaagatgcttttctgtgactggtgagtactcaaccaagtcattctgagaatagtgtatgcggcgaccgagttgctcttgcccggcgtcaatacgggataataccgcgccacatagcagaactttaaaagtgctcatcattggaaaacgttcttcggggcgaaaactctcaaggatcttaccgctgttgagatccagttcgatgtaacccactcgtgcacccaactgatcttcagcatcttttactttcaccagcgtttctgggtgagcaaaaacaggaaggcaaaatgccgcaaaaaagggaataagggcgacacggaaatgttgaatactcatactcttcctttttcaatattattgaagcatttatcagggttattgtctcatgagcggatacatatttgaatgtatttagaaaaataaacaaataggggttccgcgcacatttccccgaaaagtgccac

SEQ ID NO: 131 - DNA, 7416 bp, Artificial Sequence
  Synthetic sequence
ctaaattgtaagcgggtaccatatggtctcatgccaggcctgcgatcgcttgcaaacagaggagatatactaagcctttggaagagtgtatagatgagctagaactctacacacttggtcaatactagatttatctgcatcaaatgctttccaccagggtggattctctgggagaggtacttgaaacctacgtgcagcagcatacacgaccccacaagccagaacctcacttctgaaccttacacaaagggttgtacgcagactatcattagccaaattccaagcttcttgcctcaattccggaggtgtttctagtgttcaacatgacaaacaaaacccatctctttcagtatatgtctctcagttgtgcttaattcaaatttcaactcagagaacttcttggcatacttatccagattatctaatgatctcatctaatggtaattcaactttcagtataagtctcgcagcaaactatctttacatcaaatttttaacaactcaatgcacaaaatacttttcctcaacctaaaaataaggcaattagccaaaaacaactttgcgtgtgaacaacgcgtacacgtccctacacatacctgtcaatttataattggctattgcttccacgccttagctttctcgtgaccgaccgagtcgtcctcgtcttttttgcttctataaatcaaatacccaaagagctcttcttcttcacaattcagattccaattttctcaaactctaaaatcaatctctcaaatctctcaaccgtgatcaaggtagatttctgagttcttattgtatttcttcgatttgtttcgttcgatcgcaatttaggctctgttctttgattttgatctcgttaatctctgatcggaggcaaattacatagtttcatcgttagatctcttcttatttctcgattagggttcgtatttttcgcagatctgtttattttcttgttgtttccttgtatttgatccgatttgttgaaagaatttgtgtgttctcgattatttacgctttgatctgtgatttttatctagatttggtgttagtttcttgtttgtgcgatcgaatttgtcgattaatctcggtttatctgattaacaggtttaaacatggccctgttccaggacttcacccatctctacccactctcaaagaccatgcgcttcgagcttaagccaatcggaaagacccttgagcacatccacgccaagaactttttgtcccaggatgagactatggccgacatgtaccagaaggtgaaggctatcctcgatgactaccacagggatttcattgccgacatgatgggcgaagtgaagcttaccaagctcgccgagttctacgatgtgtacctcaagttccgcaagaacccaaaggatgatggactccagaagcagctcaaggatcttcaggctgtgctgcgcaaagagatcgttaagcctattggaaacggcggcaagtacaaggctggatacgatagacttttcggcgccaagcttttcaaggacggaaaagagcttggcgacctcgctaagttcgtgattgctcaagaaggcgagtcctctccaaagcttgctcatttggctcacttcgagaagttctccacctacttcaccggcttccacgctaaccgtaagaacatgtactccgacgaggataagcacaccgctattacctacaggctcatccacgagaacctgccacgcttcattgataacctccagatcctcgctaccatcaagcaaaagcactctgccctctacgaccagatcatcaacgagcttactgcctccggacttgatgtgtctcttgcttctcacctcgacggctaccataagcttttgacccaagagggcattaccgcctacaacactcttctcggaggaatttctggtgaggctggctctaggaagatccagggtattaacgaactcatcaactcccaccacaaccagcactgccataagtctgagaggattgctaagctcaggccactccacaagcagatcctttctgatggaatgggcgtgtccttcctgccatcaaagttcgctgatgactctgagatgtgccaggctgtgaacgagttctataggcactacgctgatgtgttcgccaaggtgcagtctctcttcgatggattcgatgaccaccaaaaggacggcatctacgtcgagcacaagaacctcaacgagttgtccaagcaggctttcggagatttcgctctccttggaagagtgctggatggctactatgtggatgttgtgaaccccgagttcaacgagagattcgctaaggctaagaccgataacgctaaggccaagctcaccaaagagaaggacaagttcatcaagggcgtgcactcactcgcttctctcgaacaagctattgagcactacaccgctaggcacgatgatgagtctgttcaggctggaaagctcggccaatatttcaagcacggacttgctggtgtggacaacccaattcagaagatccacaacaaccactccaccatcaagggattccttgagagagaaagaccagctggcgaaagggctctcccaaagattaagtctggaaagaacccagagatgacccagctcaggcagcttaaagagcttcttgacaacgctcttaacgtggcccacttcgctaagcttctcactaccaagaccactctcgataaccaggacggtaacttctacggtgagttcggtgctctctacgatgagcttgctaagatccccaccttgtacaacaaggtgagggactaccttagccagaagccattctctaccgagaagtacaagctcaacttcggcaacccaaccttgctcaacggatgggatctcaacaaagaaaaggataacttcgggatcatcctccagaaggacggttgctactaccttgctttgctcgataaggcccacaagaaggtgttcgataacgcaccaaacaccggcaagaacgtctaccagaagatgatctacaagctgctccccggaccaaacaagatgcttccaaaggtgttcttcgccaagtccaacctcgactactacaacccttctgctgagctgttggataagtacgctcagggcactcataagaagggcaacaacttcaacctcaaggactgccacgcactcatcgatttcttcaaggccggaatcaacaagcacccagagtggcaacatttcggcttcaagttctccccaaccagctcctaccaggatctctctgatttctacagagaggttgagccacagggctaccaggtgaagttcgtggatatcaacgccgactacatcaacgaacttgttgagcagggacagctctacctcttccagatctataacaaggacttcagccctaaggctcacggcaagccaaaccttcataccctctacttcaaggctctgttctccaaggacaacctcgcaaaccccatctacaagttgaacggcgaggctcagatcttctaccgcaaggcttctcttgacatgaacgagactaccatccacagagctggtgaggtgctcgaaaacaagaaccctgataaccccaagaaacgccagttcgtgtacgacatcatcaaggacaagaggtacacccaggataagttcatgctccacgtgccaatcaccatgaacttcggagttcagggcatgaccatcaaagagttcaacaagaaagtcaaccagagcatccagcagtacgacgaggttaacgtgatcggaattgatagaggtgagaggcaccttctctacctcaccgtgattaactccaagggcgagattctcgagcagcgctcccttaacgatattaccactgcttctgctaacggcacccagatgactactccataccacaagatcctcgacaagcgcgagattgagagactcaacgctagagttggatggggcgagatcgagactatcaaagagcttaagtccggctacctctctcacgttgtgcaccagatttcccagctcatgctcaagtacaacgctatcgtggtgcttgaggaccttaacttcggtttcaagcgcggaaggttcaaggtcgagaagcagatctaccaaaacttcgaaaacgccctcattaagaagctcaaccacctcgttctcaaggatgaggctgatgatgagatcggctcttacaagaacgctctccagctcactaacaactttaccgacctcaagtccatcggaaagcagaccggattcttgttctacgtgccagcttggaacacctccaagatcgatccagagactggattcgtggatctcctcaagccacgctacgagaacattgctcaatcccaggctttcttcggcaagttcgacaagatctgctacaacgctgacaaggactacttcgagttccacatcgactacgccaagttcaccgacaaggcaaagaactccaggcagatatggaagatctgcagtcacggcgacaagcgttacgtgtacgataagactgccaaccagaacaagggtgctaccaagggaatcaacgtgaacgacgagctgaagtcactcttcgctaggcatcacattaacgacaagcagcccaacctcgtgatggacatttgccagaacaacgacaaagaattccacaagtccctgatctacctcctcaagacccttcttgctctcaggtactccaacgcttcctccgatgaggatttcatcttgtccccagtggctaacgatgagggcatgttcttcaactccgctcttgctgatgatacccagccacaaaacgctgatgctaacggtgcttaccacattgctctcaaaggactttgggtcctcgagcagatcaagaactccgatgacctcaacaaggttaagctcgccattgacaaccagacctggttgaacttcgctcagaacaggaaaaggccggcggccacgaaaaaggccggccaggcaaaaaagaaaaagggatcctacccatacgatgttccagattacgcttatccctacgacgtgcctgattatgcatacccatatgatgtccccgactatgccggatccccaaagaaaaagcgcaaggtgtgacggaccgtgacgatcaaccataccagaggcgcgccatatgaagatgaagatgaaatatttggtgtgtcaaataaaaagcttgtgtgcttaagtttgtgtttttttcttggcttgttgtgttatgaatttgtggctttttctaatattaaatgaatgtaagatctcattataatgaataaacaaatgtttctataatccattgtgaatgttttgttggatctcttctgcagcatataactactgtatgtgctatggtatggactatggaatatgattaaagataaggcggccgaacgagaccatatactagtgaattcagtacattaaaaacgtccgcaatgtgttattaagttgtctaagcccgggctgggcctcatgggccttccgctcactgcccgctttccagtcgggaaacctgtcgtgccagctgcattaacatggtcatagctgtttccttgcgtattgggcgctctccgcttcctcgctcactgactcgctgcgctcggtcgttcgggtaaagcctggggtgcctaatgagcaaaaggccagcaaaaggccaggaaccgtaaaaaggccgcgttgctggcgtttttccataggctccgcccccctgacgagcatcacaaaaatcgacgctcaagtcagaggtggcgaaacccgacaggactataaagataccaggcgtttccccctggaagctccctcgtgcgctctcctgttccgaccctgccgcttaccggatacctgtccgcctttctcccttcgggaagcgtggcgctttctcatagctcacgctgtaggtatctcagttcggtgtaggtcgttcgctccaagctgggctgtgtgcacgaaccccccgttcagcccgaccgctgcgccttatccggtaactatcgtcttgagtccaacccggtaagacacgacttatcgccactggcagcagccactggtaacaggattagcagagcgaggtatgtaggcggtgctacagagttcttgaagtggtggcctaactacggctacactagaagaacagtatttggtatctgcgctctgctgaagccagttaccttcggaaaaagagttggtagctcttgatccggcaaacaaaccaccgctggtagcggtggtttttttgtttgcaagcagcagattacgcgcagaaaaaaaggatctcaagaagatcctttgatcttttctacggggtctgacgctcagtggaacgaaaactcacgttaagggattttggtcatgagattatcaaaaaggatcttcacctagatccttttaaattaaaaatgaagttttaaatcaatctaaagtatatatgagtaaacttggtctgacagttaccaatgcttaatcagtgaggcacctatctcagcgatctgtctatttcgttcatccatagttgcctgactccccgtcgtgtagataactacgatacgggagggcttaccatctggccccagtgctgcaatgataccgcgagaaccacgctcaccggctccagatttatcagcaataaaccagccagccggaagggccgagcgcagaagtggtcctgcaactttatccgcctccatccagtctattaattgttgccgggaagctagagtaagtagttcgccagttaatagtttgcgcaacgttgttgccattgctacaggcatcgtggtgtcacgctcgtcgtttggtatggcttcattcagctccggttcccaacgatcaaggcgagttacatgatcccccatgttgtgcaaaaaagcggttagctccttcggtcctccgatcgttgtcagaagtaagttggccgcagtgttatcactcatggttatggcagcactgcataattctcttactgtcatgccatccgtaagatgcttttctgtgactggtgagtactcaaccaagtcattctgagaatagtgtatgcggcgaccgagttgctcttgcccggcgtcaatacgggataataccgcgccacatagcagaactttaaaagtgctcatcattggaaaacgttcttcggggcgaaaactctcaaggatcttaccgctgttgagatccagttcgatgtaacccactcgtgcacccaactgatcttcagcatcttttactttcaccagcgtttctgggtgagcaaaaacaggaaggcaaaatgccgcaaaaaagggaataagggcgacacggaaatgttgaatactcatactcttcctttttcaatattattgaagcatttatcagggttattgtctcatgagcggatacatatttgaatgtatttagaaaaataaacaaataggggttccgcgcacatttccccgaaaagtgccac

SEQ ID NO: 132 - DNA, 7837 bp, Artificial Sequence
  Synthetic sequence
ctaaattgtaagcgttaatattttgttaaaattcgcgttaaatttttgttaaatcagctcattttttaaccaataggccgaaatcggcaaaatcccttataaatcaaaagaatagaccgagatagggttgagtggccgctacagggcgctcccattcgccattcaggctgcgcaactgttgggaagggcgtttcggtgcgggcctcttcgctattacgccagctggcgaaagggggatgtgctgcaaggcgattaagttgggtaacgccagggttttcccagtcacgacgttgtaaaacgacggccagtgagcgcgacgtaatacgactcactatagggcgaattggcggaaggccgtcaaggccgcatcccgggttgtagctccacgcgcttcggcaggggaagctctacttaatcggaagtccatatgtaactataacggtcctaaggtagcgagcgatcgcttgcaaacagaggagatatactaagcctttggaagagtgtatagatgagctagaactctacacacttggtcaatactagatttatctgcatcaaatgctttccaccagggtggattctctgggagaggtacttgaaacctacgtgcagcagcatacacgaccccacaagccagaacctcacttctgaaccttacacaaagggttgtacgcagactatcattagccaaattccaagcttcttgcctcaattccggaggtgtttctagtgttcaacatgacaaacaaaacccatctctttcagtatatgtctctcagttgtgcttaattcaaatttcaactcagagaacttcttggcatacttatccagattatctaatgatctcatctaatggtaattcaactttcagtataagtctcgcagcaaactatctttacatcaaatttttaacaactcaatgcacaaaatacttttcctcaacctaaaaataaggcaattagccaaaaacaactttgcgtgtgaacaacgcgtacacgtccctacacatacctgtcaatttataattggctattgcttccacgccttagctttctcgtgaccgaccgagtcgtcctcgtcttttttgcttctataaatcaaatacccaaagagctcttcttcttcacaattcagattccaattttctcaaactctaaaatcaatctctcaaatctctcaaccgtgatcaaggtagatttctgagttcttattgtatttcttcgatttgtttcgttcgatcgcaatttaggctctgttctttgattttgatctcgttaatctctgatcggaggcaaattacatagtttcatcgttagatctcttcttatttctcgattagggttcgtatttttcgcagatctgtttattttcttgttgtttccttgtatttgatccgatttgttgaaagaatttgtgtgttctcgattatttacgctttgatctgtgatttttatctagatttggtgttagtttcttgtttgtgcgatcgaatttgtcgattaatctcggtttatctgattaacaggtttaaacatggccctgttccaggacttcacccatctctacccactctcaaagaccatgcgcttcgagcttaagccaatcggaaagacccttgagcacatccacgccaagaactttttgtcccaggatgagactatggccgacatgtaccagaaggtgaaggctatcctcgatgactaccacagggatttcattgccgacatgatgggcgaagtgaagcttaccaagctcgccgagttctacgatgtgtacctcaagttccgcaagaacccaaaggatgatggactccagaagcagctcaaggatcttcaggctgtgctgcgcaaagagatcgttaagcctattggaaacggcggcaagtacaaggctggatacgatagacttttcggcgccaagcttttcaaggacggaaaagagcttggcgacctcgctaagttcgtgattgctcaagaaggcgagtcctctccaaagcttgctcatttggctcacttcgagaagttctccacctacttcaccggcttccacgacaaccgtaagcgcatgtactccgacgaggataagcacaccgctattacctacaggctcatccacgagaacctgccacgcttcattgataacctccagatcctcgctaccatcaagcaaaagcactctgccctctacgaccagatcatcaacgagcttactgcctccggacttgatgtgtctcttgcttctcacctcgacggctaccataagcttttgacccaagagggcattaccgcctacaacactcttctcggaggaatttctggtgaggctggctctaggaagatccagggtattaacgaactcatcaactcccaccacaaccagcactgccataagtctgagaggattgctaagctcaggccactccacaagcagatcctttctgatggaatgggcgtgtccttcctgccatcaaagttcgctgatgactctgagatgtgccaggctgtgaacgagttctataggcactacgctgatgtgttcgccaaggtgcagtctctcttcgatggattcgatgaccaccaaaaggacggcatctacgtcgagcacaagaacctcaacgagttgtccaagcaggctttcggagatttcgctctccttggaagagtgctggatggctactatgtggatgttgtgaaccccgagttcaacgagagattcgctaaggctaagaccgataacgctaaggccaagctcaccaaagagaaggacaagttcatcaagggcgtgcactcactcgcttctctcgaacaagctattgagcactacaccgctaggcacgatgatgagtctgttcaggctggaaagctcggccaatatttcaagcacggacttgctggtgtggacaacccaattcagaagatccacaacaaccactccaccatcaagggattccttgagagagaaagaccagctggcgaaagggctctcccaaagattaagtctggaaagaacccagagatgacccagctcaggcagcttaaagagcttcttgacaacgctcttaacgtggcccacttcgctaagcttctcactaccaagaccactctcgataaccaggacggtaacttctacggtgagttcggtgctctctacgatgagcttgctaagatccccaccttgtacaacaaggtgagggactaccttagccagaagccattctctaccgagaagtacaagctcaacttcggcaacccaaccttgctcaacggatgggatctcaacaaagaaaaggataacttcgggatcatcctccagaaggacggttgctactaccttgctttgctcgataaggcccacaagaaggtgttcgataacgcaccaaacaccggcaagaacgtctaccagaagatgatctacaagctgctccccggaccaaacaagatgcttccaaaggtgttcttcgccaagtccaacctcgactactacaacccttctgctgagctgttggataagtacgctcagggcactcataagaagggcaacaacttcaacctcaaggactgccacgcactcatcgatttcttcaaggccggaatcaacaagcacccagagtggcaacatttcggcttcaagttctccccaaccagctcctaccaggatctctctgatttctacagagaggttgagccacagggctaccaggtgaagttcgtggatatcaacgccgactacatcaacgaacttgttgagcagggacagctctacctcttccagatctataacaaggacttcagccctaaggctcacggcaagccaaaccttcataccctctacttcaaggctctgttctccaaggacaacctcgcaaaccccatctacaagttgaacggcgaggctcagatcttctaccgcaaggcttctcttgacatgaacgagactaccatccacagagctggtgaggtgctcgaaaacaagaaccctgataaccccaagaaacgccagttcgtgtacgacatcatcaaggacaagaggtacacccaggataagttcatgctccacgtgccaatcaccatgaacttcggagttcagggcatgaccatcaaagagttcaacaagaaagtcaaccagagcatccagcagtacgacgaggttaacgtgatcggaattgatagaggtgagaggcaccttctctacctcaccgtgattaactccaagggcgagattctcgagcagcgctcccttaacgatattaccactgcttctgctaacggcacccagatgactactccataccacaagatcctcgacaagcgcgagattgagagactcaacgctagagttggatggggcgagatcgagactatcaaagagcttaagtccggctacctctctcacgttgtgcaccagatttcccagctcatgctcaagtacaacgctatcgtggtgcttgaggaccttaacttcggtttcaagcgcggaaggttcaaggtcgagaagcagatctaccaaaacttcgaaaacgccctcattaagaagctcaaccacctcgttctcaaggatgaggctgatgatgagatcggctcttacaagaacgctctccagctcactaacaactttaccgacctcaagtccatcggaaagcagaccggattcttgttctacgtgccagcttggaacacctccaagatcgatccagagactggattcgtggatctcctcaagccacgctacgagaacattgctcaatcccaggctttcttcggcaagttcgacaagatctgctacaacgctgacaaggactacttcgagttccacatcgactacgccaagttcaccgacaaggcaaagaactccaggcagatatggaagatctgcagtcacggcgacaagcgttacgtgtacgataagactgccaaccagaacaagggtgctaccaagggaatcaacgtgaacgacgagctgaagtcactcttcgctaggcatcacattaacgacaagcagcccaacctcgtgatggacatttgccagaacaacgacaaagaattccacaagtccctgatctacctcctcaagacccttcttgctctcaggtactccaacgcttcctccgatgaggatttcatcttgtccccagtggctaacgatgagggcatgttcttcaactccgctcttgctgatgatacccagccacaaaacgctgatgctaacggtgcttaccacattgctctcaaaggactttgggtcctcgagcagatcaagaactccgatgacctcaacaaggttaagctcgccattgacaaccagacctggttgaacttcgctcagaacaggaaaaggccggcggccacgaaaaaggccggccaggcaaaaaagaaaaagggatcctacccatacgatgttccagattacgcttatccctacgacgtgcctgattatgcatacccatatgatgtccccgactatgccggatccccaaagaaaaagcgcaaggtgtgacggaccgtgacgatcaaccataccagaggcgcgccatatgaagatgaagatgaaatatttggtgtgtcaaataaaaagcttgtgtgcttaagtttgtgtttttttcttggcttgttgtgttatgaatttgtggctttttctaatattaaatgaatgtaagatctcattataatgaataaacaaatgtttctataatccattgtgaatgttttgttggatctcttctgcagcatataactactgtatgtgctatggtatggactatggaatatgattaaagataaggcggccgcattaccctgttatccctaaagcttgaattcagtacattaaaaacgtccgcaatgtgttattaagttgtctaagcccgggctgggcctcatgggccttccgctcactgcccgctttccagtcgggaaacctgtcgtgccagctgcattaacatggtcatagctgtttccttgcgtattgggcgctctccgcttcctcgctcactgactcgctgcgctcggtcgttcgggtaaagcctggggtgcctaatgagcaaaaggccagcaaaaggccaggaaccgtaaaaaggccgcgttgctggcgtttttccataggctccgcccccctgacgagcatcacaaaaatcgacgctcaagtcagaggtggcgaaacccgacaggactataaagataccaggcgtttccccctggaagctccctcgtgcgctctcctgttccgaccctgccgcttaccggatacctgtccgcctttctcccttcgggaagcgtggcgctttctcatagctcacgctgtaggtatctcagttcggtgtaggtcgttcgctccaagctgggctgtgtgcacgaaccccccgttcagcccgaccgctgcgccttatccggtaactatcgtcttgagtccaacccggtaagacacgacttatcgccactggcagcagccactggtaacaggattagcagagcgaggtatgtaggcggtgctacagagttcttgaagtggtggcctaactacggctacactagaagaacagtatttggtatctgcgctctgctgaagccagttaccttcggaaaaagagttggtagctcttgatccggcaaacaaaccaccgctggtagcggtggtttttttgtttgcaagcagcagattacgcgcagaaaaaaaggatctcaagaagatcctttgatcttttctacggggtctgacgctcagtggaacgaaaactcacgttaagggattttggtcatgagattatcaaaaaggatcttcacctagatccttttaaattaaaaatgaagttttaaatcaatctaaagtatatatgagtaaacttggtctgacagttaccaatgcttaatcagtgaggcacctatctcagcgatctgtctatttcgttcatccatagttgcctgactccccgtcgtgtagataactacgatacgggagggcttaccatctggccccagtgctgcaatgataccgcgagaaccacgctcaccggctccagatttatcagcaataaaccagccagccggaagggccgagcgcagaagtggtcctgcaactttatccgcctccatccagtctattaattgttgccgggaagctagagtaagtagttcgccagttaatagtttgcgcaacgttgttgccattgctacaggcatcgtggtgtcacgctcgtcgtttggtatggcttcattcagctccggttcccaacgatcaaggcgagttacatgatcccccatgttgtgcaaaaaagcggttagctccttcggtcctccgatcgttgtcagaagtaagttggccgcagtgttatcactcatggttatggcagcactgcataattctcttactgtcatgccatccgtaagatgcttttctgtgactggtgagtactcaaccaagtcattctgagaatagtgtatgcggcgaccgagttgctcttgcccggcgtcaatacgggataataccgcgccacatagcagaactttaaaagtgctcatcattggaaaacgttcttcggggcgaaaactctcaaggatcttaccgctgttgagatccagttcgatgtaacccactcgtgcacccaactgatcttcagcatcttttactttcaccagcgtttctgggtgagcaaaaacaggaaggcaaaatgccgcaaaaaagggaataagggcgacacggaaatgttgaatactcatactcttcctttttcaatattattgaagcatttatcagggttattgtctcatgagcggatacatatttgaatgtatttagaaaaataaacaaataggggttccgcgcacatttccccgaaaagtgccac

SEQ ID NO: 133 - DNA, 7416 bp, Artificial Sequence
  Synthetic sequence
ctaaattgtaagcgggtaccatatggtctcatgccaggcctgcgatcgcttgcaaacagaggagatatactaagcctttggaagagtgtatagatgagctagaactctacacacttggtcaatactagatttatctgcatcaaatgctttccaccagggtggattctctgggagaggtacttgaaacctacgtgcagcagcatacacgaccccacaagccagaacctcacttctgaaccttacacaaagggttgtacgcagactatcattagccaaattccaagcttcttgcctcaattccggaggtgtttctagtgttcaacatgacaaacaaaacccatctctttcagtatatgtctctcagttgtgcttaattcaaatttcaactcagagaacttcttggcatacttatccagattatctaatgatctcatctaatggtaattcaactttcagtataagtctcgcagcaaactatctttacatcaaatttttaacaactcaatgcacaaaatacttttcctcaacctaaaaataaggcaattagccaaaaacaactttgcgtgtgaacaacgcgtacacgtccctacacatacctgtcaatttataattggctattgcttccacgccttagctttctcgtgaccgaccgagtcgtcctcgtcttttttgcttctataaatcaaatacccaaagagctcttcttcttcacaattcagattccaattttctcaaactctaaaatcaatctctcaaatctctcaaccgtgatcaaggtagatttctgagttcttattgtatttcttcgatttgtttcgttcgatcgcaatttaggctctgttctttgattttgatctcgttaatctctgatcggaggcaaattacatagtttcatcgttagatctcttcttatttctcgattagggttcgtatttttcgcagatctgtttattttcttgttgtttccttgtatttgatccgatttgttgaaagaatttgtgtgttctcgattatttacgctttgatctgtgatttttatctagatttggtgttagtttcttgtttgtgcgatcgaatttgtcgattaatctcggtttatctgattaacaggtttaaacatggccctgttccaggacttcacccatctctacccactctcaaagaccatgcgcttcgagcttaagccaatcggaaagacccttgagcacatccacgccaagaactttttgtcccaggatgagactatggccgacatgtaccagaaggtgaaggctatcctcgatgactaccacagggatttcattgccgacatgatgggcgaagtgaagcttaccaagctcgccgagttctacgatgtgtacctcaagttccgcaagaacccaaaggatgatggactccagaagcagctcaaggatcttcaggctgtgctgcgcaaagagatcgttaagcctattggaaacggcggcaagtacaaggctggatacgatagacttttcggcgccaagcttttcaaggacggaaaagagcttggcgacctcgctaagttcgtgattgctcaagaaggcgagtcctctccaaagcttgctcatttggctcacttcgagaagttctccacctacttcaccggcttccactggaaccgtaagaacatgtactccgacgaggataagcacaccgctattacctacaggctcatccacgagaacctgccacgcttcattgataacctccagatcctcgctaccatcaagcaaaagcactctgccctctacgaccagatcatcaacgagcttactgcctccggacttgatgtgtctcttgcttctcacctcgacggctaccataagcttttgacccaagagggcattaccgcctacaacactcttctcggaggaatttctggtgaggctggctctaggaagatccagggtattaacgaactcatcaactcccaccacaaccagcactgccataagtctgagaggattgctaagctcaggccactccacaagcagatcctttctgatggaatgggcgtgtccttcctgccatcaaagttcgctgatgactctgagatgtgccaggctgtgaacgagttctataggcactacgctgatgtgttcgccaaggtgcagtctctcttcgatggattcgatgaccaccaaaaggacggcatctacgtcgagcacaagaacctcaacgagttgtccaagcaggctttcggagatttcgctctccttggaagagtgctggatggctactatgtggatgttgtgaaccccgagttcaacgagagattcgctaaggctaagaccgataacgctaaggccaagctcaccaaagagaaggacaagttcatcaagggcgtgcactcactcgcttctctcgaacaagctattgagcactacaccgctaggcacgatgatgagtctgttcaggctggaaagctcggccaatatttcaagcacggacttgctggtgtggacaacccaattcagaagatccacaacaaccactccaccatcaagggattccttgagagagaaagaccagctggcgaaagggctctcccaaagattaagtctggaaagaacccagagatgacccagctcaggcagcttaaagagcttcttgacaacgctcttaacgtggcccacttcgctaagcttctcactaccaagaccactctcgataaccaggacggtaacttctacggtgagttcggtgctctctacgatgagcttgctaagatccccaccttgtacaacaaggtgagggactaccttagccagaagccattctctaccgagaagtacaagctcaacttcggcaacccaaccttgctcaacggatgggatctcaacaaagaaaaggataacttcgggatcatcctccagaaggacggttgctactaccttgctttgctcgataaggcccacaagaaggtgttcgataacgcaccaaacaccggcaagaacgtctaccagaagatgatctacaagctgctccccggaccaaacaagatgcttccaaaggtgttcttcgccaagtccaacctcgactactacaacccttctgctgagctgttggataagtacgctcagggcactcataagaagggcaacaacttcaacctcaaggactgccacgcactcatcgatttcttcaaggccggaatcaacaagcacccagagtggcaacatttcggcttcaagttctccccaaccagctcctaccaggatctctctgatttctacagagaggttgagccacagggctaccaggtgaagttcgtggatatcaacgccgactacatcaacgaacttgttgagcagggacagctctacctcttccagatctataacaaggacttcagccctaaggctcacggcaagccaaaccttcataccctctacttcaaggctctgttctccaaggacaacctcgcaaaccccatctacaagttgaacggcgaggctcagatcttctaccgcaaggcttctcttgacatgaacgagactaccatccacagagctggtgaggtgctcgaaaacaagaaccctgataaccccaagaaacgccagttcgtgtacgacatcatcaaggacaagaggtacacccaggataagttcatgctccacgtgccaatcaccatgaacttcggagttcagggcatgaccatcaaagagttcaacaagaaagtcaaccagagcatccagcagtacgacgaggttaacgtgatcggaattgatagaggtgagaggcaccttctctacctcaccgtgattaactccaagggcgagattctcgagcagcgctcccttaacgatattaccactgcttctgctaacggcacccagatgactactccataccacaagatcctcgacaagcgcgagattgagagactcaacgctagagttggatggggcgagatcgagactatcaaagagcttaagtccggctacctctctcacgttgtgcaccagatttcccagctcatgctcaagtacaacgctatcgtggtgcttgaggaccttaacttcggtttcaagcgcggaaggttcaaggtcgagaagcagatctaccaaaacttcgaaaacgccctcattaagaagctcaaccacctcgttctcaaggatgaggctgatgatgagatcggctcttacaagaacgctctccagctcactaacaactttaccgacctcaagtccatcggaaagcagaccggattcttgttctacgtgccagcttggaacacctccaagatcgatccagagactggattcgtggatctcctcaagccacgctacgagaacattgctcaatcccaggctttcttcggcaagttcgacaagatctgctacaacgctgacaaggactacttcgagttccacatcgactacgccaagttcaccgacaaggcaaagaactccaggcagatatggaagatctgcagtcacggcgacaagcgttacgtgtacgataagactgccaaccagaacaagggtgctaccaagggaatcaacgtgaacgacgagctgaagtcactcttcgctaggcatcacattaacgacaagcagcccaacctcgtgatggacatttgccagaacaacgacaaagaattccacaagtccctgatctacctcctcaagacccttcttgctctcaggtactccaacgcttcctccgatgaggatttcatcttgtccccagtggctaacgatgagggcatgttcttcaactccgctcttgctgatgatacccagccacaaaacgctgatgctaacggtgcttaccacattgctctcaaaggactttgggtcctcgagcagatcaagaactccgatgacctcaacaaggttaagctcgccattgacaaccagacctggttgaacttcgctcagaacaggaaaaggccggcggccacgaaaaaggccggccaggcaaaaaagaaaaagggatcctacccatacgatgttccagattacgcttatccctacgacgtgcctgattatgcatacccatatgatgtccccgactatgccggatccccaaagaaaaagcgcaaggtgtgacggaccgtgacgatcaaccataccagaggcgcgccatatgaagatgaagatgaaatatttggtgtgtcaaataaaaagcttgtgtgcttaagtttgtgtttttttcttggcttgttgtgttatgaatttgtggctttttctaatattaaatgaatgtaagatctcattataatgaataaacaaatgtttctataatccattgtgaatgttttgttggatctcttctgcagcatataactactgtatgtgctatggtatggactatggaatatgattaaagataaggcggccgaacgagaccatatactagtgaattcagtacattaaaaacgtccgcaatgtgttattaagttgtctaagcccgggctgggcctcatgggccttccgctcactgcccgctttccagtcgggaaacctgtcgtgccagctgcattaacatggtcatagctgtttccttgcgtattgggcgctctccgcttcctcgctcactgactcgctgcgctcggtcgttcgggtaaagcctggggtgcctaatgagcaaaaggccagcaaaaggccaggaaccgtaaaaaggccgcgttgctggcgtttttccataggctccgcccccctgacgagcatcacaaaaatcgacgctcaagtcagaggtggcgaaacccgacaggactataaagataccaggcgtttccccctggaagctccctcgtgcgctctcctgttccgaccctgccgcttaccggatacctgtccgcctttctcccttcgggaagcgtggcgctttctcatagctcacgctgtaggtatctcagttcggtgtaggtcgttcgctccaagctgggctgtgtgcacgaaccccccgttcagcccgaccgctgcgccttatccggtaactatcgtcttgagtccaacccggtaagacacgacttatcgccactggcagcagccactggtaacaggattagcagagcgaggtatgtaggcggtgctacagagttcttgaagtggtggcctaactacggctacactagaagaacagtatttggtatctgcgctctgctgaagccagttaccttcggaaaaagagttggtagctcttgatccggcaaacaaaccaccgctggtagcggtggtttttttgtttgcaagcagcagattacgcgcagaaaaaaaggatctcaagaagatcctttgatcttttctacggggtctgacgctcagtggaacgaaaactcacgttaagggattttggtcatgagattatcaaaaaggatcttcacctagatccttttaaattaaaaatgaagttttaaatcaatctaaagtatatatgagtaaacttggtctgacagttaccaatgcttaatcagtgaggcacctatctcagcgatctgtctatttcgttcatccatagttgcctgactccccgtcgtgtagataactacgatacgggagggcttaccatctggccccagtgctgcaatgataccgcgagaaccacgctcaccggctccagatttatcagcaataaaccagccagccggaagggccgagcgcagaagtggtcctgcaactttatccgcctccatccagtctattaattgttgccgggaagctagagtaagtagttcgccagttaatagtttgcgcaacgttgttgccattgctacaggcatcgtggtgtcacgctcgtcgtttggtatggcttcattcagctccggttcccaacgatcaaggcgagttacatgatcccccatgttgtgcaaaaaagcggttagctccttcggtcctccgatcgttgtcagaagtaagttggccgcagtgttatcactcatggttatggcagcactgcataattctcttactgtcatgccatccgtaagatgcttttctgtgactggtgagtactcaaccaagtcattctgagaatagtgtatgcggcgaccgagttgctcttgcccggcgtcaatacgggataataccgcgccacatagcagaactttaaaagtgctcatcattggaaaacgttcttcggggcgaaaactctcaaggatcttaccgctgttgagatccagttcgatgtaacccactcgtgcacccaactgatcttcagcatcttttactttcaccagcgtttctgggtgagcaaaaacaggaaggcaaaatgccgcaaaaaagggaataagggcgacacggaaatgttgaatactcatactcttcctttttcaatattattgaagcatttatcagggttattgtctcatgagcggatacatatttgaatgtatttagaaaaataaacaaataggggttccgcgcacatttccccgaaaagtgccac

SEQ ID NO: 134 - DNA, 7416 bp, Artificial Sequence
  Synthetic sequence
ctaaattgtaagcgggtaccatatggtctcatgccaggcctgcgatcgcttgcaaacagaggagatatactaagcctttggaagagtgtatagatgagctagaactctacacacttggtcaatactagatttatctgcatcaaatgctttccaccagggtggattctctgggagaggtacttgaaacctacgtgcagcagcatacacgaccccacaagccagaacctcacttctgaaccttacacaaagggttgtacgcagactatcattagccaaattccaagcttcttgcctcaattccggaggtgtttctagtgttcaacatgacaaacaaaacccatctctttcagtatatgtctctcagttgtgcttaattcaaatttcaactcagagaacttcttggcatacttatccagattatctaatgatctcatctaatggtaattcaactttcagtataagtctcgcagcaaactatctttacatcaaatttttaacaactcaatgcacaaaatacttttcctcaacctaaaaataaggcaattagccaaaaacaactttgcgtgtgaacaacgcgtacacgtccctacacatacctgtcaatttataattggctattgcttccacgccttagctttctcgtgaccgaccgagtcgtcctcgtcttttttgcttctataaatcaaatacccaaagagctcttcttcttcacaattcagattccaattttctcaaactctaaaatcaatctctcaaatctctcaaccgtgatcaaggtagatttctgagttcttattgtatttcttcgatttgtttcgttcgatcgcaatttaggctctgttctttgattttgatctcgttaatctctgatcggaggcaaattacatagtttcatcgttagatctcttcttatttctcgattagggttcgtatttttcgcagatctgtttattttcttgttgtttccttgtatttgatccgatttgttgaaagaatttgtgtgttctcgattatttacgctttgatctgtgatttttatctagatttggtgttagtttcttgtttgtgcgatcgaatttgtcgattaatctcggtttatctgattaacaggtttaaacatggccctgttccaggacttcacccatctctacccactctcaaagaccatgcgcttcgagcttaagccaatcggaaagacccttgagcacatccacgccaagaactttttgtcccaggatgagactatggccgacatgtaccagaaggtgaaggctatcctcgatgactaccacagggatttcattgccgacatgatgggcgaagtgaagcttaccaagctcgccgagttctacgatgtgtacctcaagttccgcaagaacccaaaggatgatggactccagaagcagctcaaggatcttcaggctgtgctgcgcaaagagatcgttaagcctattggaaacggcggcaagtacaaggctggatacgatagacttttcggcgccaagcttttcaaggacggaaaagagcttggcgacctcgctaagttcgtgattgctcaagaaggcgagtcctctccaaagcttgctcatttggctcacttcgagaagttctccacctacttcaccggcttccacgacaaccgtaagaacatgtactccgacgaggataagcacaccgctattacctacaggctcatccacgagaacctgccacgcttcattgataacctccagatcctcgctaccatcaagcaaaagcactctgccctctacgaccagatcatcaacgagcttactgcctccggacttgatgtgtctcttgcttctcacctcgacggctaccataagcttttgacccaagagggcattaccgcctacaacactcttctcggaggaatttctggtgaggctggctctaggaagatccagggtattaacgaactcatcaactcccaccacaaccagcactgccataagtctgagaggattgctaagctcaggccactccacaagcagatcctttctgatggaatgggcgtgtccttcctgccatcaaagttcgctgatgactctgagatgtgccaggctgtgaacgagttctataggcactacgctgatgtgttcgccaaggtgcagtctctcttcgatggattcgatgaccaccaaaaggacggcatctacgtcgagcacaagaacctcaacgagttgtccaagcaggctttcggagatttcgctctccttggaagagtgctggatggctactatgtggatgttgtgaaccccgagttcaacgagagattcgctaaggctaagaccgataacgctaaggccaagctcaccaaagagaaggacaagttcatcaagggcgtgcactcactcgcttctctcgaacaagctattgagcactacaccgctaggcacgatgatgagtctgttcaggctggaaagctcggccaatatttcaagcacggacttgctggtgtggacaacccaattcagaagatccacaacaaccactccaccatcaagggattccttgagagagaaagaccagctggcgaaagggctctcccaaagattaagtctggaaagaacccagagatgacccagctcaggcagcttaaagagcttcttgacaacgctcttaacgtggcccacttcgctaagcttctcactaccaagaccactctcgataaccaggacggtaacttctacggtgagttcggtgctctctacgatgagcttgctaagatccccaccttgtacaacaaggtgagggactaccttagccagaagccattctctaccgagaagtacaagctcaacttcggcagaccaaccttgctcaacggatgggatctcaacaaagaaaaggataacttcgggatcatcctccagaaggacggttgctactaccttgctttgctcgataaggcccacaagaaggtgttcgataacgcaccaaacaccggcaagaacgtctaccagaagatgatctacaagctgctccccggaccaaacaagatgcttccaaaggtgttcttcgccaagtccaacctcgactactacaacccttctgctgagctgttggataagtacgctcagggcactcataagaagggcaacaacttcaacctcaaggactgccacgcactcatcgatttcttcaaggccggaatcaacaagcacccagagtggcaacatttcggcttcaagttctccccaaccagctcctaccaggatctctctgatttctacagagaggttgagccacagggctaccaggtgaagttcgtggatatcaacgccgactacatcaacgaacttgttgagcagggacagctctacctcttccagatctataacaaggacttcagccctaaggctcacggcaagccaaaccttcataccctctacttcaaggctctgttctccaaggacaacctcgcaaaccccatctacaagttgaacggcgaggctcagatcttctaccgcaaggcttctcttgacatgaacgagactaccatccacagagctggtgaggtgctcgaaaacaagaaccctgataaccccaagaaacgccagttcgtgtacgacatcatcaaggacaagaggtacacccaggataagttcatgctccacgtgccaatcaccatgaacttcggagttcagggcatgaccatcaaagagttcaacaagaaagtcaaccagagcatccagcagtacgacgaggttaacgtgatcggaattgatagaggtgagaggcaccttctctacctcaccgtgattaactccaagggcgagattctcgagcagcgctcccttaacgatattaccactgcttctgctaacggcacccagatgactactccataccacaagatcctcgacaagcgcgagattgagagactcaacgctagagttggatggggcgagatcgagactatcaaagagcttaagtccggctacctctctcacgttgtgcaccagatttcccagctcatgctcaagtacaacgctatcgtggtgcttgaggaccttaacttcggtttcaagcgcggaaggttcaaggtcgagaagcagatctaccaaaacttcgaaaacgccctcattaagaagctcaaccacctcgttctcaaggatgaggctgatgatgagatcggctcttacaagaacgctctccagctcactaacaactttaccgacctcaagtccatcggaaagcagaccggattcttgttctacgtgccagcttggaacacctccaagatcgatccagagactggattcgtggatctcctcaagccacgctacgagaacattgctcaatcccaggctttcttcggcaagttcgacaagatctgctacaacgctgacaaggactacttcgagttccacatcgactacgccaagttcaccgacaaggcaaagaactccaggcagatatggaagatctgcagtcacggcgacaagcgttacgtgtacgataagactgccaaccagaacaagggtgctaccaagggaatcaacgtgaacgacgagctgaagtcactcttcgctaggcatcacattaacgacaagcagcccaacctcgtgatggacatttgccagaacaacgacaaagaattccacaagtccctgatctacctcctcaagacccttcttgctctcaggtactccaacgcttcctccgatgaggatttcatcttgtccccagtggctaacgatgagggcatgttcttcaactccgctcttgctgatgatacccagccacaaaacgctgatgctaacggtgcttaccacattgctctcaaaggactttgggtcctcgagcagatcaagaactccgatgacctcaacaaggttaagctcgccattgacaaccagacctggttgaacttcgctcagaacaggaaaaggccggcggccacgaaaaaggccggccaggcaaaaaagaaaaagggatcctacccatacgatgttccagattacgcttatccctacgacgtgcctgattatgcatacccatatgatgtccccgactatgccggatccccaaagaaaaagcgcaaggtgtgacggaccgtgacgatcaaccataccagaggcgcgccatatgaagatgaagatgaaatatttggtgtgtcaaataaaaagcttgtgtgcttaagtttgtgtttttttcttggcttgttgtgttatgaatttgtggctttttctaatattaaatgaatgtaagatctcattataatgaataaacaaatgtttctataatccattgtgaatgttttgttggatctcttctgcagcatataactactgtatgtgctatggtatggactatggaatatgattaaagataaggcggccgaacgagaccatatactagtgaattcagtacattaaaaacgtccgcaatgtgttattaagttgtctaagcccgggctgggcctcatgggccttccgctcactgcccgctttccagtcgggaaacctgtcgtgccagctgcattaacatggtcatagctgtttccttgcgtattgggcgctctccgcttcctcgctcactgactcgctgcgctcggtcgttcgggtaaagcctggggtgcctaatgagcaaaaggccagcaaaaggccaggaaccgtaaaaaggccgcgttgctggcgtttttccataggctccgcccccctgacgagcatcacaaaaatcgacgctcaagtcagaggtggcgaaacccgacaggactataaagataccaggcgtttccccctggaagctccctcgtgcgctctcctgttccgaccctgccgcttaccggatacctgtccgcctttctcccttcgggaagcgtggcgctttctcatagctcacgctgtaggtatctcagttcggtgtaggtcgttcgctccaagctgggctgtgtgcacgaaccccccgttcagcccgaccgctgcgccttatccggtaactatcgtcttgagtccaacccggtaagacacgacttatcgccactggcagcagccactggtaacaggattagcagagcgaggtatgtaggcggtgctacagagttcttgaagtggtggcctaactacggctacactagaagaacagtatttggtatctgcgctctgctgaagccagttaccttcggaaaaagagttggtagctcttgatccggcaaacaaaccaccgctggtagcggtggtttttttgtttgcaagcagcagattacgcgcagaaaaaaaggatctcaagaagatcctttgatcttttctacggggtctgacgctcagtggaacgaaaactcacgttaagggattttggtcatgagattatcaaaaaggatcttcacctagatccttttaaattaaaaatgaagttttaaatcaatctaaagtatatatgagtaaacttggtctgacagttaccaatgcttaatcagtgaggcacctatctcagcgatctgtctatttcgttcatccatagttgcctgactccccgtcgtgtagataactacgatacgggagggcttaccatctggccccagtgctgcaatgataccgcgagaaccacgctcaccggctccagatttatcagcaataaaccagccagccggaagggccgagcgcagaagtggtcctgcaactttatccgcctccatccagtctattaattgttgccgggaagctagagtaagtagttcgccagttaatagtttgcgcaacgttgttgccattgctacaggcatcgtggtgtcacgctcgtcgtttggtatggcttcattcagctccggttcccaacgatcaaggcgagttacatgatcccccatgttgtgcaaaaaagcggttagctccttcggtcctccgatcgttgtcagaagtaagttggccgcagtgttatcactcatggttatggcagcactgcataattctcttactgtcatgccatccgtaagatgcttttctgtgactggtgagtactcaaccaagtcattctgagaatagtgtatgcggcgaccgagttgctcttgcccggcgtcaatacgggataataccgcgccacatagcagaactttaaaagtgctcatcattggaaaacgttcttcggggcgaaaactctcaaggatcttaccgctgttgagatccagttcgatgtaacccactcgtgcacccaactgatcttcagcatcttttactttcaccagcgtttctgggtgagcaaaaacaggaaggcaaaatgccgcaaaaaagggaataagggcgacacggaaatgttgaatactcatactcttcctttttcaatattattgaagcatttatcagggttattgtctcatgagcggatacatatttgaatgtatttagaaaaataaacaaataggggttccgcgcacatttccccgaaaagtgccac

SEQ ID NO: 135 - DNA, 7416 bp, Artificial Sequence
  Synthetic sequence
ctaaattgtaagcgggtaccatatggtctcatgccaggcctgcgatcgcttgcaaacagaggagatatactaagcctttggaagagtgtatagatgagctagaactctacacacttggtcaatactagatttatctgcatcaaatgctttccaccagggtggattctctgggagaggtacttgaaacctacgtgcagcagcatacacgaccccacaagccagaacctcacttctgaaccttacacaaagggttgtacgcagactatcattagccaaattccaagcttcttgcctcaattccggaggtgtttctagtgttcaacatgacaaacaaaacccatctctttcagtatatgtctctcagttgtgcttaattcaaatttcaactcagagaacttcttggcatacttatccagattatctaatgatctcatctaatggtaattcaactttcagtataagtctcgcagcaaactatctttacatcaaatttttaacaactcaatgcacaaaatacttttcctcaacctaaaaataaggcaattagccaaaaacaactttgcgtgtgaacaacgcgtacacgtccctacacatacctgtcaatttataattggctattgcttccacgccttagctttctcgtgaccgaccgagtcgtcctcgtcttttttgcttctataaatcaaatacccaaagagctcttcttcttcacaattcagattccaattttctcaaactctaaaatcaatctctcaaatctctcaaccgtgatcaaggtagatttctgagttcttattgtatttcttcgatttgtttcgttcgatcgcaatttaggctctgttctttgattttgatctcgttaatctctgatcggaggcaaattacatagtttcatcgttagatctcttcttatttctcgattagggttcgtatttttcgcagatctgtttattttcttgttgtttccttgtatttgatccgatttgttgaaagaatttgtgtgttctcgattatttacgctttgatctgtgatttttatctagatttggtgttagtttcttgtttgtgcgatcgaatttgtcgattaatctcggtttatctgattaacaggtttaaacatggccctgttccaggacttcacccatctctacccactctcaaagaccatgcgcttcgagcttaagccaatcggaaagacccttgagcacatccacgccaagaactttttgtcccaggatgagactatggccgacatgtaccagaaggtgaaggctatcctcgatgactaccacagggatttcattgccgacatgatgggcgaagtgaagcttaccaagctcgccgagttctacgatgtgtacctcaagttccgcaagaacccaaaggatgatggactccagaagcagctcaaggatcttcaggctgtgctgcgcaaagagatcgttaagcctattggaaacggcggcaagtacaaggctggatacgatagacttttcggcgccaagcttttcaaggacggaaaagagcttggcgacctcgctaagttcgtgattgctcaagaaggcgagtcctctccaaagcttgctcatttggctcacttcgagaagttctccacctacttcaccggcttccacgacaaccgtaagaacatgtactccgacgaggataagcacaccgctattacctacaggctcatccacgagaacctgccacgcttcattgataacctccagatcctcgctaccatcaagcaaaagcactctgccctctacgaccagatcatcaacgagcttactgcctccggacttgatgtgtctcttgcttctcacctcgacggctaccataagcttttgacccaagagggcattaccgcctacaacactcttctcggaggaatttctggtgaggctggctctaggaagatccagggtattaacgaactcatcaactcccaccacaaccagcactgccataagtctgagaggattgctaagctcaggccactccacaagcagatcctttctgatggaatgggcgtgtccttcctgccatcaaagttcgctgatgactctgagatgtgccaggctgtgaacgagttctataggcactacgctgatgtgttcgccaaggtgcagtctctcttcgatggattcgatgaccaccaaaaggacggcatctacgtcgagcacaagaacctcaacgagttgtccaagcaggctttcggagatttcgctctccttggaagagtgctggatggctactatgtggatgttgtgaaccccgagttcaacgagagattcgctaaggctaagaccgataacgctaaggccaagctcaccaaagagaaggacaagttcatcaagggcgtgcactcactcgcttctctcgaacaagctattgagcactacaccgctaggcacgatgatgagtctgttcaggctggaaagctcggccaatatttcaagcacggacttgctggtgtggacaacccaattcagaagatccacaacaaccactccaccatcaagggattccttgagagagaaagaccagctggcgaaagggctctcccaaagattaagtctggaaagaacccagagatgacccagctcaggcagcttaaagagcttcttgacaacgctcttaacgtggcccacttcgctaagcttctcactaccaagaccactctcgataaccaggacggtaacttctacggtgagttcggtgctctctacgatgagcttgctaagatccccaccttgtacaacaaggtgagggactaccttagccagaagccattctctaccgagaagtacaagctcaacttcggcaacccaaccttgctcaacggatgggatctcaacaaagaaaaggataacttcgggatcatcctccagaaggacggttgctactaccttgctttgctcgataaggcccacaagaaggtgttcgataacgcaccaaacaccggcaagaacgtctaccagaagatgatctacaagctgctccccggaccaaacaagatgcttccaaaggtgttcttcgccaagtccaacctcgactactacaacccttctgctgagctgttggataagtacgctcagggcactcataagaagggcaacaacttcaacctcaaggactgccacgcactcatcgatttcttcaaggccggaatcaacaagcacccagagtggcaacatttcggcttcaagttctccccaaccagctcctaccaggatctctctgatttctacagagaggttgagccacagggctaccaggtgaagttcgtggatatcaacgccgactacatcaacgaacttgttgagcagggacagctctacctcttccagatctataacaaggacttcagccctaaggctcacggcaagccaaaccttcataccctctacttcaaggctctgttctccaaggacaacctcgcaaaccccatctacaagttgaacggcgaggctcagatcttctaccgcaaggcttctcttgacatgaacgagactaccatccacagagctggtgaggtgctcgaaaacaagaaccctgataaccccaagaaacgccagttcgtgtacgacatcatcaaggacaagaggtacacccaggataagttccttctccacgtgccaatcaccatgaacttcggagttcagggcatgaccatcaaagagttcaacaagaaagtcaaccagagcatccagcagtacgacgaggttaacgtgatcggaattgatagaggtgagaggcaccttctctacctcaccgtgattaactccaagggcgagattctcgagcagcgctcccttaacgatattaccactgcttctgctaacggcacccagatgactactccataccacaagatcctcgacaagcgcgagattgagagactcaacgctagagttggatggggcgagatcgagactatcaaagagcttaagtccggctacctctctcacgttgtgcaccagatttcccagctcatgctcaagtacaacgctatcgtggtgcttgaggaccttaacttcggtttcaagcgcggaaggttcaaggtcgagaagcagatctaccaaaacttcgaaaacgccctcattaagaagctcaaccacctcgttctcaaggatgaggctgatgatgagatcggctcttacaagaacgctctccagctcactaacaactttaccgacctcaagtccatcggaaagcagaccggattcttgttctacgtgccagcttggaacacctccaagatcgatccagagactggattcgtggatctcctcaagccacgctacgagaacattgctcaatcccaggctttcttcggcaagttcgacaagatctgctacaacgctgacaaggactacttcgagttccacatcgactacgccaagttcaccgacaaggcaaagaactccaggcagatatggaagatctgcagtcacggcgacaagcgttacgtgtacgataagactgccaaccagaacaagggtgctaccaagggaatcaacgtgaacgacgagctgaagtcactcttcgctaggcatcacattaacgacaagcagcccaacctcgtgatggacatttgccagaacaacgacaaagaattccacaagtccctgatctacctcctcaagacccttcttgctctcaggtactccaacgcttcctccgatgaggatttcatcttgtccccagtggctaacgatgagggcatgttcttcaactccgctcttgctgatgatacccagccacaaaacgctgatgctaacggtgcttaccacattgctctcaaaggactttgggtcctcgagcagatcaagaactccgatgacctcaacaaggttaagctcgccattgacaaccagacctggttgaacttcgctcagaacaggaaaaggccggcggccacgaaaaaggccggccaggcaaaaaagaaaaagggatcctacccatacgatgttccagattacgcttatccctacgacgtgcctgattatgcatacccatatgatgtccccgactatgccggatccccaaagaaaaagcgcaaggtgtgacggaccgtgacgatcaaccataccagaggcgcgccatatgaagatgaagatgaaatatttggtgtgtcaaataaaaagcttgtgtgcttaagtttgtgtttttttcttggcttgttgtgttatgaatttgtggctttttctaatattaaatgaatgtaagatctcattataatgaataaacaaatgtttctataatccattgtgaatgttttgttggatctcttctgcagcatataactactgtatgtgctatggtatggactatggaatatgattaaagataaggcggccgaacgagaccatatactagtgaattcagtacattaaaaacgtccgcaatgtgttattaagttgtctaagcccgggctgggcctcatgggccttccgctcactgcccgctttccagtcgggaaacctgtcgtgccagctgcattaacatggtcatagctgtttccttgcgtattgggcgctctccgcttcctcgctcactgactcgctgcgctcggtcgttcgggtaaagcctggggtgcctaatgagcaaaaggccagcaaaaggccaggaaccgtaaaaaggccgcgttgctggcgtttttccataggctccgcccccctgacgagcatcacaaaaatcgacgctcaagtcagaggtggcgaaacccgacaggactataaagataccaggcgtttccccctggaagctccctcgtgcgctctcctgttccgaccctgccgcttaccggatacctgtccgcctttctcccttcgggaagcgtggcgctttctcatagctcacgctgtaggtatctcagttcggtgtaggtcgttcgctccaagctgggctgtgtgcacgaaccccccgttcagcccgaccgctgcgccttatccggtaactatcgtcttgagtccaacccggtaagacacgacttatcgccactggcagcagccactggtaacaggattagcagagcgaggtatgtaggcggtgctacagagttcttgaagtggtggcctaactacggctacactagaagaacagtatttggtatctgcgctctgctgaagccagttaccttcggaaaaagagttggtagctcttgatccggcaaacaaaccaccgctggtagcggtggtttttttgtttgcaagcagcagattacgcgcagaaaaaaaggatctcaagaagatcctttgatcttttctacggggtctgacgctcagtggaacgaaaactcacgttaagggattttggtcatgagattatcaaaaaggatcttcacctagatccttttaaattaaaaatgaagttttaaatcaatctaaagtatatatgagtaaacttggtctgacagttaccaatgcttaatcagtgaggcacctatctcagcgatctgtctatttcgttcatccatagttgcctgactccccgtcgtgtagataactacgatacgggagggcttaccatctggccccagtgctgcaatgataccgcgagaaccacgctcaccggctccagatttatcagcaataaaccagccagccggaagggccgagcgcagaagtggtcctgcaactttatccgcctccatccagtctattaattgttgccgggaagctagagtaagtagttcgccagttaatagtttgcgcaacgttgttgccattgctacaggcatcgtggtgtcacgctcgtcgtttggtatggcttcattcagctccggttcccaacgatcaaggcgagttacatgatcccccatgttgtgcaaaaaagcggttagctccttcggtcctccgatcgttgtcagaagtaagttggccgcagtgttatcactcatggttatggcagcactgcataattctcttactgtcatgccatccgtaagatgcttttctgtgactggtgagtactcaaccaagtcattctgagaatagtgtatgcggcgaccgagttgctcttgcccggcgtcaatacgggataataccgcgccacatagcagaactttaaaagtgctcatcattggaaaacgttcttcggggcgaaaactctcaaggatcttaccgctgttgagatccagttcgatgtaacccactcgtgcacccaactgatcttcagcatcttttactttcaccagcgtttctgggtgagcaaaaacaggaaggcaaaatgccgcaaaaaagggaataagggcgacacggaaatgttgaatactcatactcttcctttttcaatattattgaagcatttatcagggttattgtctcatgagcggatacatatttgaatgtatttagaaaaataaacaaataggggttccgcgcacatttccccgaaaagtgccac

SEQ ID NO: 136 - DNA, 7416 bp, Artificial Sequence
  Synthetic sequence
ctaaattgtaagcgggtaccatatggtctcatgccaggcctgcgatcgcttgcaaacagaggagatatactaagcctttggaagagtgtatagatgagctagaactctacacacttggtcaatactagatttatctgcatcaaatgctttccaccagggtggattctctgggagaggtacttgaaacctacgtgcagcagcatacacgaccccacaagccagaacctcacttctgaaccttacacaaagggttgtacgcagactatcattagccaaattccaagcttcttgcctcaattccggaggtgtttctagtgttcaacatgacaaacaaaacccatctctttcagtatatgtctctcagttgtgcttaattcaaatttcaactcagagaacttcttggcatacttatccagattatctaatgatctcatctaatggtaattcaactttcagtataagtctcgcagcaaactatctttacatcaaatttttaacaactcaatgcacaaaatacttttcctcaacctaaaaataaggcaattagccaaaaacaactttgcgtgtgaacaacgcgtacacgtccctacacatacctgtcaatttataattggctattgcttccacgccttagctttctcgtgaccgaccgagtcgtcctcgtcttttttgcttctataaatcaaatacccaaagagctcttcttcttcacaattcagattccaattttctcaaactctaaaatcaatctctcaaatctctcaaccgtgatcaaggtagatttctgagttcttattgtatttcttcgatttgtttcgttcgatcgcaatttaggctctgttctttgattttgatctcgttaatctctgatcggaggcaaattacatagtttcatcgttagatctcttcttatttctcgattagggttcgtatttttcgcagatctgtttattttcttgttgtttccttgtatttgatccgatttgttgaaagaatttgtgtgttctcgattatttacgctttgatctgtgatttttatctagatttggtgttagtttcttgtttgtgcgatcgaatttgtcgattaatctcggtttatctgattaacaggtttaaacatggccctgttccaggacttcacccatctctacccactctcaaagaccatgcgcttcgagcttaagccaatcggaaagacccttgagcacatccacgccaagaactttttgtcccaggatgagactatggccgacatgtaccagaaggtgaaggctatcctcgatgactaccacagggatttcattgccgacatgatgggcgaagtgaagcttaccaagctcgccgagttctacgatgtgtacctcaagttccgcaagaacccaaaggatgatggactccagaagcagctcaaggatcttcaggctgtgctgcgcaaagagatcgttaagcctattggaaacggcggcaagtacaaggctggatacgatagacttttcggcgccaagcttttcaaggacggaaaagagcttggcgacctcgctaagttcgtgattgctcaagaaggcgagtcctctccaaagcttgctcatttggctcacttcgagaagttctccacctacttcaccggcttccacgacaaccgtaagaacatgtactccgacgaggataagcacaccgctattacctacaggctcatccacgagaacctgccacgcttcattgataacctccagatcctcgctaccatcaagcaaaagcactctgccctctacgaccagatcatcaacgagcttactgcctccggacttgatgtgtctcttgcttctcacctcgacggctaccataagcttttgacccaagagggcattaccgcctacaacactcttctcggaggaatttctggtgaggctggctctaggaagatccagggtattaacgaactcatcaactcccaccacaaccagcactgccataagtctgagaggattgctaagctcaggccactccacaagcagatcctttctgatggaatgggcgtgtccttcctgccatcaaagttcgctgatgactctgagatgtgccaggctgtgaacgagttctataggcactacgctgatgtgttcgccaaggtgcagtctctcttcgatggattcgatgaccaccaaaaggacggcatctacgtcgagcacaagaacctcaacgagttgtccaagcaggctttcggagatttcgctctccttggaagagtgctggatggctactatgtggatgttgtgaaccccgagttcaacgagagattcgctaaggctaagaccgataacgctaaggccaagctcaccaaagagaaggacaagttcatcaagggcgtgcactcactcgcttctctcgaacaagctattgagcactacaccgctaggcacgatgatgagtctgttcaggctggaaagctcggccaatatttcaagcacggacttgctggtgtggacaacccaattcagaagatccacaacaaccactccaccatcaagggattccttgagagagaaagaccagctggcgaaagggctctcccaaagattaagtctggaaagaacccagagatgacccagctcaggcagcttaaagagcttcttgacaacgctcttaacgtggcccacttcgctaagcttctcactaccaagaccactctcgataaccaggacggtaacttctacggtgagttcggtgctctctacgatgagcttgctaagatccccaccttgtacaacaaggtgagggactaccttagccagaagccattctctaccgagaagtacaagctcaacttcggcagaccaaccttgctcaacggatgggatctcaacaaagaaaaggataacttcgggatcatcctccagaaggacggttgctactaccttgctttgctcgataaggcccacaagaaggtgttcgataacgcaccaaacaccggcaagaacgtctaccagaagatgatctacaagctgctccccggaccaaacaagatgcttccaaaggtgttcttcgccaagtccaacctcgactactacaacccttctgctgagctgttggataagtacgctcagggcactcataagaagggcaacaacttcaacctcaaggactgccacgcactcatcgatttcttcaaggccggaatcaacaagcacccagagtggcaacatttcggcttcaagttctccccaaccagctcctaccaggatctctctgatttctacagagaggttgagccacagggctaccaggtgaagttcgtggatatcaacgccgactacatcaacgaacttgttgagcagggacagctctacctcttccagatctataacaaggacttcagccctaaggctcacggcaagccaaaccttcataccctctacttcaaggctctgttctccaaggacaacctcgcaaaccccatctacaagttgaacggcgaggctcagatcttctaccgcaaggcttctcttgacatgaacgagactaccatccacagagctggtgaggtgctcgaaaacaagaaccctgataaccccaagaaacgccagttcgtgtacgacatcatcaaggacaagaggtacacccaggataagttccttctccacgtgccaatcaccatgaacttcggagttcagggcatgaccatcaaagagttcaacaagaaagtcaaccagagcatccagcagtacgacgaggttaacgtgatcggaattgatagaggtgagaggcaccttctctacctcaccgtgattaactccaagggcgagattctcgagcagcgctcccttaacgatattaccactgcttctgctaacggcacccagatgactactccataccacaagatcctcgacaagcgcgagattgagagactcaacgctagagttggatggggcgagatcgagactatcaaagagcttaagtccggctacctctctcacgttgtgcaccagatttcccagctcatgctcaagtacaacgctatcgtggtgcttgaggaccttaacttcggtttcaagcgcggaaggttcaaggtcgagaagcagatctaccaaaacttcgaaaacgccctcattaagaagctcaaccacctcgttctcaaggatgaggctgatgatgagatcggctcttacaagaacgctctccagctcactaacaactttaccgacctcaagtccatcggaaagcagaccggattcttgttctacgtgccagcttggaacacctccaagatcgatccagagactggattcgtggatctcctcaagccacgctacgagaacattgctcaatcccaggctttcttcggcaagttcgacaagatctgctacaacgctgacaaggactacttcgagttccacatcgactacgccaagttcaccgacaaggcaaagaactccaggcagatatggaagatctgcagtcacggcgacaagcgttacgtgtacgataagactgccaaccagaacaagggtgctaccaagggaatcaacgtgaacgacgagctgaagtcactcttcgctaggcatcacattaacgacaagcagcccaacctcgtgatggacatttgccagaacaacgacaaagaattccacaagtccctgatctacctcctcaagacccttcttgctctcaggtactccaacgcttcctccgatgaggatttcatcttgtccccagtggctaacgatgagggcatgttcttcaactccgctcttgctgatgatacccagccacaaaacgctgatgctaacggtgcttaccacattgctctcaaaggactttgggtcctcgagcagatcaagaactccgatgacctcaacaaggttaagctcgccattgacaaccagacctggttgaacttcgctcagaacaggaaaaggccggcggccacgaaaaaggccggccaggcaaaaaagaaaaagggatcctacccatacgatgttccagattacgcttatccctacgacgtgcctgattatgcatacccatatgatgtccccgactatgccggatccccaaagaaaaagcgcaaggtgtgacggaccgtgacgatcaaccataccagaggcgcgccatatgaagatgaagatgaaatatttggtgtgtcaaataaaaagcttgtgtgcttaagtttgtgtttttttcttggcttgttgtgttatgaatttgtggctttttctaatattaaatgaatgtaagatctcattataatgaataaacaaatgtttctataatccattgtgaatgttttgttggatctcttctgcagcatataactactgtatgtgctatggtatggactatggaatatgattaaagataaggcggccgaacgagaccatatactagtgaattcagtacattaaaaacgtccgcaatgtgttattaagttgtctaagcccgggctgggcctcatgggccttccgctcactgcccgctttccagtcgggaaacctgtcgtgccagctgcattaacatggtcatagctgtttccttgcgtattgggcgctctccgcttcctcgctcactgactcgctgcgctcggtcgttcgggtaaagcctggggtgcctaatgagcaaaaggccagcaaaaggccaggaaccgtaaaaaggccgcgttgctggcgtttttccataggctccgcccccctgacgagcatcacaaaaatcgacgctcaagtcagaggtggcgaaacccgacaggactataaagataccaggcgtttccccctggaagctccctcgtgcgctctcctgttccgaccctgccgcttaccggatacctgtccgcctttctcccttcgggaagcgtggcgctttctcatagctcacgctgtaggtatctcagttcggtgtaggtcgttcgctccaagctgggctgtgtgcacgaaccccccgttcagcccgaccgctgcgccttatccggtaactatcgtcttgagtccaacccggtaagacacgacttatcgccactggcagcagccactggtaacaggattagcagagcgaggtatgtaggcggtgctacagagttcttgaagtggtggcctaactacggctacactagaagaacagtatttggtatctgcgctctgctgaagccagttaccttcggaaaaagagttggtagctcttgatccggcaaacaaaccaccgctggtagcggtggtttttttgtttgcaagcagcagattacgcgcagaaaaaaaggatctcaagaagatcctttgatcttttctacggggtctgacgctcagtggaacgaaaactcacgttaagggattttggtcatgagattatcaaaaaggatcttcacctagatccttttaaattaaaaatgaagttttaaatcaatctaaagtatatatgagtaaacttggtctgacagttaccaatgcttaatcagtgaggcacctatctcagcgatctgtctatttcgttcatccatagttgcctgactccccgtcgtgtagataactacgatacgggagggcttaccatctggccccagtgctgcaatgataccgcgagaaccacgctcaccggctccagatttatcagcaataaaccagccagccggaagggccgagcgcagaagtggtcctgcaactttatccgcctccatccagtctattaattgttgccgggaagctagagtaagtagttcgccagttaatagtttgcgcaacgttgttgccattgctacaggcatcgtggtgtcacgctcgtcgtttggtatggcttcattcagctccggttcccaacgatcaaggcgagttacatgatcccccatgttgtgcaaaaaagcggttagctccttcggtcctccgatcgttgtcagaagtaagttggccgcagtgttatcactcatggttatggcagcactgcataattctcttactgtcatgccatccgtaagatgcttttctgtgactggtgagtactcaaccaagtcattctgagaatagtgtatgcggcgaccgagttgctcttgcccggcgtcaatacgggataataccgcgccacatagcagaactttaaaagtgctcatcattggaaaacgttcttcggggcgaaaactctcaaggatcttaccgctgttgagatccagttcgatgtaacccactcgtgcacccaactgatcttcagcatcttttactttcaccagcgtttctgggtgagcaaaaacaggaaggcaaaatgccgcaaaaaagggaataagggcgacacggaaatgttgaatactcatactcttcctttttcaatattattgaagcatttatcagggttattgtctcatgagcggatacatatttgaatgtatttagaaaaataaacaaataggggttccgcgcacatttccccgaaaagtgccac

SEQ ID NO: 137 - DNA, 7416 bp, Artificial Sequence
  Synthetic sequence
ctaaattgtaagcgggtaccatatggtctcatgccaggcctgcgatcgcttgcaaacagaggagatatactaagcctttggaagagtgtatagatgagctagaactctacacacttggtcaatactagatttatctgcatcaaatgctttccaccagggtggattctctgggagaggtacttgaaacctacgtgcagcagcatacacgaccccacaagccagaacctcacttctgaaccttacacaaagggttgtacgcagactatcattagccaaattccaagcttcttgcctcaattccggaggtgtttctagtgttcaacatgacaaacaaaacccatctctttcagtatatgtctctcagttgtgcttaattcaaatttcaactcagagaacttcttggcatacttatccagattatctaatgatctcatctaatggtaattcaactttcagtataagtctcgcagcaaactatctttacatcaaatttttaacaactcaatgcacaaaatacttttcctcaacctaaaaataaggcaattagccaaaaacaactttgcgtgtgaacaacgcgtacacgtccctacacatacctgtcaatttataattggctattgcttccacgccttagctttctcgtgaccgaccgagtcgtcctcgtcttttttgcttctataaatcaaatacccaaagagctcttcttcttcacaattcagattccaattttctcaaactctaaaatcaatctctcaaatctctcaaccgtgatcaaggtagatttctgagttcttattgtatttcttcgatttgtttcgttcgatcgcaatttaggctctgttctttgattttgatctcgttaatctctgatcggaggcaaattacatagtttcatcgttagatctcttcttatttctcgattagggttcgtatttttcgcagatctgtttattttcttgttgtttccttgtatttgatccgatttgttgaaagaatttgtgtgttctcgattatttacgctttgatctgtgatttttatctagatttggtgttagtttcttgtttgtgcgatcgaatttgtcgattaatctcggtttatctgattaacaggtttaaacatggccctgttccaggacttcacccatctctacccactctcaaagaccatgcgcttcgagcttaagccaatcggaaagacccttgagcacatccacgccaagaactttttgtcccaggatgagactatggccgacatgtaccagaaggtgaaggctatcctcgatgactaccacagggatttcattgccgacatgatgggcgaagtgaagcttaccaagctcgccgagttctacgatgtgtacctcaagttccgcaagaacccaaaggatgatggactccagaagcagctcaaggatcttcaggctgtgctgcgcaaagagatcgttaagcctattggaaacggcggcaagtacaaggctggatacgatagacttttcggcgccaagcttttcaaggacggaaaagagcttggcgacctcgctaagttcgtgattgctcaagaaggcgagtcctctccaaagcttgctcatttggctcacttcgagaagttctccacctacttcaccggcttccacagaaaccgtaagaacatgtactccgacgaggataagcacaccgctattacctacaggctcatccacgagaacctgccacgcttcattgataacctccagatcctcgctaccatcaagcaaaagcactctgccctctacgaccagatcatcaacgagcttactgcctccggacttgatgtgtctcttgcttctcacctcgacggctaccataagcttttgacccaagagggcattaccgcctacaacactcttctcggaggaatttctggtgaggctggctctaggaagatccagggtattaacgaactcatcaactcccaccacaaccagcactgccataagtctgagaggattgctaagctcaggccactccacaagcagatcctttctgatggaatgggcgtgtccttcctgccatcaaagttcgctgatgactctgagatgtgccaggctgtgaacgagttctataggcactacgctgatgtgttcgccaaggtgcagtctctcttcgatggattcgatgaccaccaaaaggacggcatctacgtcgagcacaagaacctcaacgagttgtccaagcaggctttcggagatttcgctctccttggaagagtgctggatggctactatgtggatgttgtgaaccccgagttcaacgagagattcgctaaggctaagaccgataacgctaaggccaagctcaccaaagagaaggacaagttcatcaagggcgtgcactcactcgcttctctcgaacaagctattgagcactacaccgctaggcacgatgatgagtctgttcaggctggaaagctcggccaatatttcaagcacggacttgctggtgtggacaacccaattcagaagatccacaacaaccactccaccatcaagggattccttgagagagaaagaccagctggcgaaagggctctcccaaagattaagtctggaaagaacccagagatgacccagctcaggcagcttaaagagcttcttgacaacgctcttaacgtggcccacttcgctaagcttctcactaccaagaccactctcgataaccaggacggtaacttctacggtgagttcggtgctctctacgatgagcttgctaagatccccaccttgtacaacaaggtgagggactaccttagccagaagccattctctaccgagaagtacaagctcaacttcggcagaccaaccttgctcaacggatgggatctcaacaaagaaaaggataacttcgggatcatcctccagaaggacggttgctactaccttgctttgctcgataaggcccacaagaaggtgttcgataacgcaccaaacaccggcaagaacgtctaccagaagatgatctacaagctgctccccggaccaaacaagatgcttccaaaggtgttcttcgccaagtccaacctcgactactacaacccttctgctgagctgttggataagtacgctcagggcactcataagaagggcaacaacttcaacctcaaggactgccacgcactcatcgatttcttcaaggccggaatcaacaagcacccagagtggcaacatttcggcttcaagttctccccaaccagctcctaccaggatctctctgatttctacagagaggttgagccacagggctaccaggtgaagttcgtggatatcaacgccgactacatcaacgaacttgttgagcagggacagctctacctcttccagatctataacaaggacttcagccctaaggctcacggcaagccaaaccttcataccctctacttcaaggctctgttctccaaggacaacctcgcaaaccccatctacaagttgaacggcgaggctcagatcttctaccgcaaggcttctcttgacatgaacgagactaccatccacagagctggtgaggtgctcgaaaacaagaaccctgataaccccaagaaacgccagttcgtgtacgacatcatcaaggacaagaggtacacccaggataagttcatgctccacgtgccaatcaccatgaacttcggagttcagggcatgaccatcaaagagttcaacaagaaagtcaaccagagcatccagcagtacgacgaggttaacgtgatcggaattgatagaggtgagaggcaccttctctacctcaccgtgattaactccaagggcgagattctcgagcagcgctcccttaacgatattaccactgcttctgctaacggcacccagatgactactccataccacaagatcctcgacaagcgcgagattgagagactcaacgctagagttggatggggcgagatcgagactatcaaagagcttaagtccggctacctctctcacgttgtgcaccagatttcccagctcatgctcaagtacaacgctatcgtggtgcttgaggaccttaacttcggtttcaagcgcggaaggttcaaggtcgagaagcagatctaccaaaacttcgaaaacgccctcattaagaagctcaaccacctcgttctcaaggatgaggctgatgatgagatcggctcttacaagaacgctctccagctcactaacaactttaccgacctcaagtccatcggaaagcagaccggattcttgttctacgtgccagcttggaacacctccaagatcgatccagagactggattcgtggatctcctcaagccacgctacgagaacattgctcaatcccaggctttcttcggcaagttcgacaagatctgctacaacgctgacaaggactacttcgagttccacatcgactacgccaagttcaccgacaaggcaaagaactccaggcagatatggaagatctgcagtcacggcgacaagcgttacgtgtacgataagactgccaaccagaacaagggtgctaccaagggaatcaacgtgaacgacgagctgaagtcactcttcgctaggcatcacattaacgacaagcagcccaacctcgtgatggacatttgccagaacaacgacaaagaattccacaagtccctgatctacctcctcaagacccttcttgctctcaggtactccaacgcttcctccgatgaggatttcatcttgtccccagtggctaacgatgagggcatgttcttcaactccgctcttgctgatgatacccagccacaaaacgctgatgctaacggtgcttaccacattgctctcaaaggactttgggtcctcgagcagatcaagaactccgatgacctcaacaaggttaagctcgccattgacaaccagacctggttgaacttcgctcagaacaggaaaaggccggcggccacgaaaaaggccggccaggcaaaaaagaaaaagggatcctacccatacgatgttccagattacgcttatccctacgacgtgcctgattatgcatacccatatgatgtccccgactatgccggatccccaaagaaaaagcgcaaggtgtgacggaccgtgacgatcaaccataccagaggcgcgccatatgaagatgaagatgaaatatttggtgtgtcaaataaaaagcttgtgtgcttaagtttgtgtttttttcttggcttgttgtgttatgaatttgtggctttttctaatattaaatgaatgtaagatctcattataatgaataaacaaatgtttctataatccattgtgaatgttttgttggatctcttctgcagcatataactactgtatgtgctatggtatggactatggaatatgattaaagataaggcggccgaacgagaccatatactagtgaattcagtacattaaaaacgtccgcaatgtgttattaagttgtctaagcccgggctgggcctcatgggccttccgctcactgcccgctttccagtcgggaaacctgtcgtgccagctgcattaacatggtcatagctgtttccttgcgtattgggcgctctccgcttcctcgctcactgactcgctgcgctcggtcgttcgggtaaagcctggggtgcctaatgagcaaaaggccagcaaaaggccaggaaccgtaaaaaggccgcgttgctggcgtttttccataggctccgcccccctgacgagcatcacaaaaatcgacgctcaagtcagaggtggcgaaacccgacaggactataaagataccaggcgtttccccctggaagctccctcgtgcgctctcctgttccgaccctgccgcttaccggatacctgtccgcctttctcccttcgggaagcgtggcgctttctcatagctcacgctgtaggtatctcagttcggtgtaggtcgttcgctccaagctgggctgtgtgcacgaaccccccgttcagcccgaccgctgcgccttatccggtaactatcgtcttgagtccaacccggtaagacacgacttatcgccactggcagcagccactggtaacaggattagcagagcgaggtatgtaggcggtgctacagagttcttgaagtggtggcctaactacggctacactagaagaacagtatttggtatctgcgctctgctgaagccagttaccttcggaaaaagagttggtagctcttgatccggcaaacaaaccaccgctggtagcggtggtttttttgtttgcaagcagcagattacgcgcagaaaaaaaggatctcaagaagatcctttgatcttttctacggggtctgacgctcagtggaacgaaaactcacgttaagggattttggtcatgagattatcaaaaaggatcttcacctagatccttttaaattaaaaatgaagttttaaatcaatctaaagtatatatgagtaaacttggtctgacagttaccaatgcttaatcagtgaggcacctatctcagcgatctgtctatttcgttcatccatagttgcctgactccccgtcgtgtagataactacgatacgggagggcttaccatctggccccagtgctgcaatgataccgcgagaaccacgctcaccggctccagatttatcagcaataaaccagccagccggaagggccgagcgcagaagtggtcctgcaactttatccgcctccatccagtctattaattgttgccgggaagctagagtaagtagttcgccagttaatagtttgcgcaacgttgttgccattgctacaggcatcgtggtgtcacgctcgtcgtttggtatggcttcattcagctccggttcccaacgatcaaggcgagttacatgatcccccatgttgtgcaaaaaagcggttagctccttcggtcctccgatcgttgtcagaagtaagttggccgcagtgttatcactcatggttatggcagcactgcataattctcttactgtcatgccatccgtaagatgcttttctgtgactggtgagtactcaaccaagtcattctgagaatagtgtatgcggcgaccgagttgctcttgcccggcgtcaatacgggataataccgcgccacatagcagaactttaaaagtgctcatcattggaaaacgttcttcggggcgaaaactctcaaggatcttaccgctgttgagatccagttcgatgtaacccactcgtgcacccaactgatcttcagcatcttttactttcaccagcgtttctgggtgagcaaaaacaggaaggcaaaatgccgcaaaaaagggaataagggcgacacggaaatgttgaatactcatactcttcctttttcaatattattgaagcatttatcagggttattgtctcatgagcggatacatatttgaatgtatttagaaaaataaacaaataggggttccgcgcacatttccccgaaaagtgccac

SEQ ID NO: 138 - DNA, 7416 bp, Artificial Sequence
  Synthetic sequence
ctaaattgtaagcgggtaccatatggtctcatgccaggcctgcgatcgcttgcaaacagaggagatatactaagcctttggaagagtgtatagatgagctagaactctacacacttggtcaatactagatttatctgcatcaaatgctttccaccagggtggattctctgggagaggtacttgaaacctacgtgcagcagcatacacgaccccacaagccagaacctcacttctgaaccttacacaaagggttgtacgcagactatcattagccaaattccaagcttcttgcctcaattccggaggtgtttctagtgttcaacatgacaaacaaaacccatctctttcagtatatgtctctcagttgtgcttaattcaaatttcaactcagagaacttcttggcatacttatccagattatctaatgatctcatctaatggtaattcaactttcagtataagtctcgcagcaaactatctttacatcaaatttttaacaactcaatgcacaaaatacttttcctcaacctaaaaataaggcaattagccaaaaacaactttgcgtgtgaacaacgcgtacacgtccctacacatacctgtcaatttataattggctattgcttccacgccttagctttctcgtgaccgaccgagtcgtcctcgtcttttttgcttctataaatcaaatacccaaagagctcttcttcttcacaattcagattccaattttctcaaactctaaaatcaatctctcaaatctctcaaccgtgatcaaggtagatttctgagttcttattgtatttcttcgatttgtttcgttcgatcgcaatttaggctctgttctttgattttgatctcgttaatctctgatcggaggcaaattacatagtttcatcgttagatctcttcttatttctcgattagggttcgtatttttcgcagatctgtttattttcttgttgtttccttgtatttgatccgatttgttgaaagaatttgtgtgttctcgattatttacgctttgatctgtgatttttatctagatttggtgttagtttcttgtttgtgcgatcgaatttgtcgattaatctcggtttatctgattaacaggtttaaacatggccctgttccaggacttcacccatctctacccactctcaaagaccatgcgcttcgagcttaagccaatcggaaagacccttgagcacatccacgccaagaactttttgtcccaggatgagactatggccgacatgtaccagaaggtgaaggctatcctcgatgactaccacagggatttcattgccgacatgatgggcgaagtgaagcttaccaagctcgccgagttctacgatgtgtacctcaagttccgcaagaacccaaaggatgatggactccagaagcagctcaaggatcttcaggctgtgctgcgcaaagagatcgttaagcctattggaaacggcggcaagtacaaggctggatacgatagacttttcggcgccaagcttttcaaggacggaaaagagcttggcgacctcgctaagttcgtgattgctcaagaaggcgagtcctctccaaagcttgctcatttggctcacttcgagaagttctccacctacttcaccggcttccacagaaaccgtaagaacatgtactccgacgaggataagcacaccgctattacctacaggctcatccacgagaacctgccacgcttcattgataacctccagatcctcgctaccatcaagcaaaagcactctgccctctacgaccagatcatcaacgagcttactgcctccggacttgatgtgtctcttgcttctcacctcgacggctaccataagcttttgacccaagagggcattaccgcctacaacactcttctcggaggaatttctggtgaggctggctctaggaagatccagggtattaacgaactcatcaactcccaccacaaccagcactgccataagtctgagaggattgctaagctcaggccactccacaagcagatcctttctgatggaatgggcgtgtccttcctgccatcaaagttcgctgatgactctgagatgtgccaggctgtgaacgagttctataggcactacgctgatgtgttcgccaaggtgcagtctctcttcgatggattcgatgaccaccaaaaggacggcatctacgtcgagcacaagaacctcaacgagttgtccaagcaggctttcggagatttcgctctccttggaagagtgctggatggctactatgtggatgttgtgaaccccgagttcaacgagagattcgctaaggctaagaccgataacgctaaggccaagctcaccaaagagaaggacaagttcatcaagggcgtgcactcactcgcttctctcgaacaagctattgagcactacaccgctaggcacgatgatgagtctgttcaggctggaaagctcggccaatatttcaagcacggacttgctggtgtggacaacccaattcagaagatccacaacaaccactccaccatcaagggattccttgagagagaaagaccagctggcgaaagggctctcccaaagattaagtctggaaagaacccagagatgacccagctcaggcagcttaaagagcttcttgacaacgctcttaacgtggcccacttcgctaagcttctcactaccaagaccactctcgataaccaggacggtaacttctacggtgagttcggtgctctctacgatgagcttgctaagatccccaccttgtacaacaaggtgagggactaccttagccagaagccattctctaccgagaagtacaagctcaacttcggcaacccaaccttgctcaacggatgggatctcaacaaagaaaaggataacttcgggatcatcctccagaaggacggttgctactaccttgctttgctcgataaggcccacaagaaggtgttcgataacgcaccaaacaccggcaagaacgtctaccagaagatgatctacaagctgctccccggaccaaacaagatgcttccaaaggtgttcttcgccaagtccaacctcgactactacaacccttctgctgagctgttggataagtacgctcagggcactcataagaagggcaacaacttcaacctcaaggactgccacgcactcatcgatttcttcaaggccggaatcaacaagcacccagagtggcaacatttcggcttcaagttctccccaaccagctcctaccaggatctctctgatttctacagagaggttgagccacagggctaccaggtgaagttcgtggatatcaacgccgactacatcaacgaacttgttgagcagggacagctctacctcttccagatctataacaaggacttcagccctaaggctcacggcaagccaaaccttcataccctctacttcaaggctctgttctccaaggacaacctcgcaaaccccatctacaagttgaacggcgaggctcagatcttctaccgcaaggcttctcttgacatgaacgagactaccatccacagagctggtgaggtgctcgaaaacaagaaccctgataaccccaagaaacgccagttcgtgtacgacatcatcaaggacaagaggtacacccaggataagttccttctccacgtgccaatcaccatgaacttcggagttcagggcatgaccatcaaagagttcaacaagaaagtcaaccagagcatccagcagtacgacgaggttaacgtgatcggaattgatagaggtgagaggcaccttctctacctcaccgtgattaactccaagggcgagattctcgagcagcgctcccttaacgatattaccactgcttctgctaacggcacccagatgactactccataccacaagatcctcgacaagcgcgagattgagagactcaacgctagagttggatggggcgagatcgagactatcaaagagcttaagtccggctacctctctcacgttgtgcaccagatttcccagctcatgctcaagtacaacgctatcgtggtgcttgaggaccttaacttcggtttcaagcgcggaaggttcaaggtcgagaagcagatctaccaaaacttcgaaaacgccctcattaagaagctcaaccacctcgttctcaaggatgaggctgatgatgagatcggctcttacaagaacgctctccagctcactaacaactttaccgacctcaagtccatcggaaagcagaccggattcttgttctacgtgccagcttggaacacctccaagatcgatccagagactggattcgtggatctcctcaagccacgctacgagaacattgctcaatcccaggctttcttcggcaagttcgacaagatctgctacaacgctgacaaggactacttcgagttccacatcgactacgccaagttcaccgacaaggcaaagaactccaggcagatatggaagatctgcagtcacggcgacaagcgttacgtgtacgataagactgccaaccagaacaagggtgctaccaagggaatcaacgtgaacgacgagctgaagtcactcttcgctaggcatcacattaacgacaagcagcccaacctcgtgatggacatttgccagaacaacgacaaagaattccacaagtccctgatctacctcctcaagacccttcttgctctcaggtactccaacgcttcctccgatgaggatttcatcttgtccccagtggctaacgatgagggcatgttcttcaactccgctcttgctgatgatacccagccacaaaacgctgatgctaacggtgcttaccacattgctctcaaaggactttgggtcctcgagcagatcaagaactccgatgacctcaacaaggttaagctcgccattgacaaccagacctggttgaacttcgctcagaacaggaaaaggccggcggccacgaaaaaggccggccaggcaaaaaagaaaaagggatcctacccatacgatgttccagattacgcttatccctacgacgtgcctgattatgcatacccatatgatgtccccgactatgccggatccccaaagaaaaagcgcaaggtgtgacggaccgtgacgatcaaccataccagaggcgcgccatatgaagatgaagatgaaatatttggtgtgtcaaataaaaagcttgtgtgcttaagtttgtgtttttttcttggcttgttgtgttatgaatttgtggctttttctaatattaaatgaatgtaagatctcattataatgaataaacaaatgtttctataatccattgtgaatgttttgttggatctcttctgcagcatataactactgtatgtgctatggtatggactatggaatatgattaaagataaggcggccgaacgagaccatatactagtgaattcagtacattaaaaacgtccgcaatgtgttattaagttgtctaagcccgggctgggcctcatgggccttccgctcactgcccgctttccagtcgggaaacctgtcgtgccagctgcattaacatggtcatagctgtttccttgcgtattgggcgctctccgcttcctcgctcactgactcgctgcgctcggtcgttcgggtaaagcctggggtgcctaatgagcaaaaggccagcaaaaggccaggaaccgtaaaaaggccgcgttgctggcgtttttccataggctccgcccccctgacgagcatcacaaaaatcgacgctcaagtcagaggtggcgaaacccgacaggactataaagataccaggcgtttccccctggaagctccctcgtgcgctctcctgttccgaccctgccgcttaccggatacctgtccgcctttctcccttcgggaagcgtggcgctttctcatagctcacgctgtaggtatctcagttcggtgtaggtcgttcgctccaagctgggctgtgtgcacgaaccccccgttcagcccgaccgctgcgccttatccggtaactatcgtcttgagtccaacccggtaagacacgacttatcgccactggcagcagccactggtaacaggattagcagagcgaggtatgtaggcggtgctacagagttcttgaagtggtggcctaactacggctacactagaagaacagtatttggtatctgcgctctgctgaagccagttaccttcggaaaaagagttggtagctcttgatccggcaaacaaaccaccgctggtagcggtggtttttttgtttgcaagcagcagattacgcgcagaaaaaaaggatctcaagaagatcctttgatcttttctacggggtctgacgctcagtggaacgaaaactcacgttaagggattttggtcatgagattatcaaaaaggatcttcacctagatccttttaaattaaaaatgaagttttaaatcaatctaaagtatatatgagtaaacttggtctgacagttaccaatgcttaatcagtgaggcacctatctcagcgatctgtctatttcgttcatccatagttgcctgactccccgtcgtgtagataactacgatacgggagggcttaccatctggccccagtgctgcaatgataccgcgagaaccacgctcaccggctccagatttatcagcaataaaccagccagccggaagggccgagcgcagaagtggtcctgcaactttatccgcctccatccagtctattaattgttgccgggaagctagagtaagtagttcgccagttaatagtttgcgcaacgttgttgccattgctacaggcatcgtggtgtcacgctcgtcgtttggtatggcttcattcagctccggttcccaacgatcaaggcgagttacatgatcccccatgttgtgcaaaaaagcggttagctccttcggtcctccgatcgttgtcagaagtaagttggccgcagtgttatcactcatggttatggcagcactgcataattctcttactgtcatgccatccgtaagatgcttttctgtgactggtgagtactcaaccaagtcattctgagaatagtgtatgcggcgaccgagttgctcttgcccggcgtcaatacgggataataccgcgccacatagcagaactttaaaagtgctcatcattggaaaacgttcttcggggcgaaaactctcaaggatcttaccgctgttgagatccagttcgatgtaacccactcgtgcacccaactgatcttcagcatcttttactttcaccagcgtttctgggtgagcaaaaacaggaaggcaaaatgccgcaaaaaagggaataagggcgacacggaaatgttgaatactcatactcttcctttttcaatattattgaagcatttatcagggttattgtctcatgagcggatacatatttgaatgtatttagaaaaataaacaaataggggttccgcgcacatttccccgaaaagtgccac

SEQ ID NO: 139 - DNA, 7416 bp, Artificial Sequence
  Synthetic sequence
ctaaattgtaagcgggtaccatatggtctcatgccaggcctgcgatcgcttgcaaacagaggagatatactaagcctttggaagagtgtatagatgagctagaactctacacacttggtcaatactagatttatctgcatcaaatgctttccaccagggtggattctctgggagaggtacttgaaacctacgtgcagcagcatacacgaccccacaagccagaacctcacttctgaaccttacacaaagggttgtacgcagactatcattagccaaattccaagcttcttgcctcaattccggaggtgtttctagtgttcaacatgacaaacaaaacccatctctttcagtatatgtctctcagttgtgcttaattcaaatttcaactcagagaacttcttggcatacttatccagattatctaatgatctcatctaatggtaattcaactttcagtataagtctcgcagcaaactatctttacatcaaatttttaacaactcaatgcacaaaatacttttcctcaacctaaaaataaggcaattagccaaaaacaactttgcgtgtgaacaacgcgtacacgtccctacacatacctgtcaatttataattggctattgcttccacgccttagctttctcgtgaccgaccgagtcgtcctcgtcttttttgcttctataaatcaaatacccaaagagctcttcttcttcacaattcagattccaattttctcaaactctaaaatcaatctctcaaatctctcaaccgtgatcaaggtagatttctgagttcttattgtatttcttcgatttgtttcgttcgatcgcaatttaggctctgttctttgattttgatctcgttaatctctgatcggaggcaaattacatagtttcatcgttagatctcttcttatttctcgattagggttcgtatttttcgcagatctgtttattttcttgttgtttccttgtatttgatccgatttgttgaaagaatttgtgtgttctcgattatttacgctttgatctgtgatttttatctagatttggtgttagtttcttgtttgtgcgatcgaatttgtcgattaatctcggtttatctgattaacaggtttaaacatggccctgttccaggacttcacccatctctacccactctcaaagaccatgcgcttcgagcttaagccaatcggaaagacccttgagcacatccacgccaagaactttttgtcccaggatgagactatggccgacatgtaccagaaggtgaaggctatcctcgatgactaccacagggatttcattgccgacatgatgggcgaagtgaagcttaccaagctcgccgagttctacgatgtgtacctcaagttccgcaagaacccaaaggatgatggactccagaagcagctcaaggatcttcaggctgtgctgcgcaaagagatcgttaagcctattggaaacggcggcaagtacaaggctggatacgatagacttttcggcgccaagcttttcaaggacggaaaagagcttggcgacctcgctaagttcgtgattgctcaagaaggcgagtcctctccaaagcttgctcatttggctcacttcgagaagttctccacctacttcaccggcttccacagaaaccgtaagaacatgtactccgacgaggataagcacaccgctattacctacaggctcatccacgagaacctgccacgcttcattgataacctccagatcctcgctaccatcaagcaaaagcactctgccctctacgaccagatcatcaacgagcttactgcctccggacttgatgtgtctcttgcttctcacctcgacggctaccataagcttttgacccaagagggcattaccgcctacaacactcttctcggaggaatttctggtgaggctggctctaggaagatccagggtattaacgaactcatcaactcccaccacaaccagcactgccataagtctgagaggattgctaagctcaggccactccacaagcagatcctttctgatggaatgggcgtgtccttcctgccatcaaagttcgctgatgactctgagatgtgccaggctgtgaacgagttctataggcactacgctgatgtgttcgccaaggtgcagtctctcttcgatggattcgatgaccaccaaaaggacggcatctacgtcgagcacaagaacctcaacgagttgtccaagcaggctttcggagatttcgctctccttggaagagtgctggatggctactatgtggatgttgtgaaccccgagttcaacgagagattcgctaaggctaagaccgataacgctaaggccaagctcaccaaagagaaggacaagttcatcaagggcgtgcactcactcgcttctctcgaacaagctattgagcactacaccgctaggcacgatgatgagtctgttcaggctggaaagctcggccaatatttcaagcacggacttgctggtgtggacaacccaattcagaagatccacaacaaccactccaccatcaagggattccttgagagagaaagaccagctggcgaaagggctctcccaaagattaagtctggaaagaacccagagatgacccagctcaggcagcttaaagagcttcttgacaacgctcttaacgtggcccacttcgctaagcttctcactaccaagaccactctcgataaccaggacggtaacttctacggtgagttcggtgctctctacgatgagcttgctaagatccccaccttgtacaacaaggtgagggactaccttagccagaagccattctctaccgagaagtacaagctcaacttcggcagaccaaccttgctcaacggatgggatctcaacaaagaaaaggataacttcgggatcatcctccagaaggacggttgctactaccttgctttgctcgataaggcccacaagaaggtgttcgataacgcaccaaacaccggcaagaacgtctaccagaagatgatctacaagctgctccccggaccaaacaagatgcttccaaaggtgttcttcgccaagtccaacctcgactactacaacccttctgctgagctgttggataagtacgctcagggcactcataagaagggcaacaacttcaacctcaaggactgccacgcactcatcgatttcttcaaggccggaatcaacaagcacccagagtggcaacatttcggcttcaagttctccccaaccagctcctaccaggatctctctgatttctacagagaggttgagccacagggctaccaggtgaagttcgtggatatcaacgccgactacatcaacgaacttgttgagcagggacagctctacctcttccagatctataacaaggacttcagccctaaggctcacggcaagccaaaccttcataccctctacttcaaggctctgttctccaaggacaacctcgcaaaccccatctacaagttgaacggcgaggctcagatcttctaccgcaaggcttctcttgacatgaacgagactaccatccacagagctggtgaggtgctcgaaaacaagaaccctgataaccccaagaaacgccagttcgtgtacgacatcatcaaggacaagaggtacacccaggataagttccttctccacgtgccaatcaccatgaacttcggagttcagggcatgaccatcaaagagttcaacaagaaagtcaaccagagcatccagcagtacgacgaggttaacgtgatcggaattgatagaggtgagaggcaccttctctacctcaccgtgattaactccaagggcgagattctcgagcagcgctcccttaacgatattaccactgcttctgctaacggcacccagatgactactccataccacaagatcctcgacaagcgcgagattgagagactcaacgctagagttggatggggcgagatcgagactatcaaagagcttaagtccggctacctctctcacgttgtgcaccagatttcccagctcatgctcaagtacaacgctatcgtggtgcttgaggaccttaacttcggtttcaagcgcggaaggttcaaggtcgagaagcagatctaccaaaacttcgaaaacgccctcattaagaagctcaaccacctcgttctcaaggatgaggctgatgatgagatcggctcttacaagaacgctctccagctcactaacaactttaccgacctcaagtccatcggaaagcagaccggattcttgttctacgtgccagcttggaacacctccaagatcgatccagagactggattcgtggatctcctcaagccacgctacgagaacattgctcaatcccaggctttcttcggcaagttcgacaagatctgctacaacgctgacaaggactacttcgagttccacatcgactacgccaagttcaccgacaaggcaaagaactccaggcagatatggaagatctgcagtcacggcgacaagcgttacgtgtacgataagactgccaaccagaacaagggtgctaccaagggaatcaacgtgaacgacgagctgaagtcactcttcgctaggcatcacattaacgacaagcagcccaacctcgtgatggacatttgccagaacaacgacaaagaattccacaagtccctgatctacctcctcaagacccttcttgctctcaggtactccaacgcttcctccgatgaggatttcatcttgtccccagtggctaacgatgagggcatgttcttcaactccgctcttgctgatgatacccagccacaaaacgctgatgctaacggtgcttaccacattgctctcaaaggactttgggtcctcgagcagatcaagaactccgatgacctcaacaaggttaagctcgccattgacaaccagacctggttgaacttcgctcagaacaggaaaaggccggcggccacgaaaaaggccggccaggcaaaaaagaaaaagggatcctacccatacgatgttccagattacgcttatccctacgacgtgcctgattatgcatacccatatgatgtccccgactatgccggatccccaaagaaaaagcgcaaggtgtgacggaccgtgacgatcaaccataccagaggcgcgccatatgaagatgaagatgaaatatttggtgtgtcaaataaaaagcttgtgtgcttaagtttgtgtttttttcttggcttgttgtgttatgaatttgtggctttttctaatattaaatgaatgtaagatctcattataatgaataaacaaatgtttctataatccattgtgaatgttttgttggatctcttctgcagcatataactactgtatgtgctatggtatggactatggaatatgattaaagataaggcggccgaacgagaccatatactagtgaattcagtacattaaaaacgtccgcaatgtgttattaagttgtctaagcccgggctgggcctcatgggccttccgctcactgcccgctttccagtcgggaaacctgtcgtgccagctgcattaacatggtcatagctgtttccttgcgtattgggcgctctccgcttcctcgctcactgactcgctgcgctcggtcgttcgggtaaagcctggggtgcctaatgagcaaaaggccagcaaaaggccaggaaccgtaaaaaggccgcgttgctggcgtttttccataggctccgcccccctgacgagcatcacaaaaatcgacgctcaagtcagaggtggcgaaacccgacaggactataaagataccaggcgtttccccctggaagctccctcgtgcgctctcctgttccgaccctgccgcttaccggatacctgtccgcctttctcccttcgggaagcgtggcgctttctcatagctcacgctgtaggtatctcagttcggtgtaggtcgttcgctccaagctgggctgtgtgcacgaaccccccgttcagcccgaccgctgcgccttatccggtaactatcgtcttgagtccaacccggtaagacacgacttatcgccactggcagcagccactggtaacaggattagcagagcgaggtatgtaggcggtgctacagagttcttgaagtggtggcctaactacggctacactagaagaacagtatttggtatctgcgctctgctgaagccagttaccttcggaaaaagagttggtagctcttgatccggcaaacaaaccaccgctggtagcggtggtttttttgtttgcaagcagcagattacgcgcagaaaaaaaggatctcaagaagatcctttgatcttttctacggggtctgacgctcagtggaacgaaaactcacgttaagggattttggtcatgagattatcaaaaaggatcttcacctagatccttttaaattaaaaatgaagttttaaatcaatctaaagtatatatgagtaaacttggtctgacagttaccaatgcttaatcagtgaggcacctatctcagcgatctgtctatttcgttcatccatagttgcctgactccccgtcgtgtagataactacgatacgggagggcttaccatctggccccagtgctgcaatgataccgcgagaaccacgctcaccggctccagatttatcagcaataaaccagccagccggaagggccgagcgcagaagtggtcctgcaactttatccgcctccatccagtctattaattgttgccgggaagctagagtaagtagttcgccagttaatagtttgcgcaacgttgttgccattgctacaggcatcgtggtgtcacgctcgtcgtttggtatggcttcattcagctccggttcccaacgatcaaggcgagttacatgatcccccatgttgtgcaaaaaagcggttagctccttcggtcctccgatcgttgtcagaagtaagttggccgcagtgttatcactcatggttatggcagcactgcataattctcttactgtcatgccatccgtaagatgcttttctgtgactggtgagtactcaaccaagtcattctgagaatagtgtatgcggcgaccgagttgctcttgcccggcgtcaatacgggataataccgcgccacatagcagaactttaaaagtgctcatcattggaaaacgttcttcggggcgaaaactctcaaggatcttaccgctgttgagatccagttcgatgtaacccactcgtgcacccaactgatcttcagcatcttttactttcaccagcgtttctgggtgagcaaaaacaggaaggcaaaatgccgcaaaaaagggaataagggcgacacggaaatgttgaatactcatactcttcctttttcaatattattgaagcatttatcagggttattgtctcatgagcggatacatatttgaatgtatttagaaaaataaacaaataggggttccgcgcacatttccccgaaaagtgccac

SEQ ID NO: 140 - protein, 1276 aa, Artificial Sequence
  Synthetic sequence
MAPKKKRKVMQINNLKIIYMKFTDFTGLYSLSKTLRFELKPIGKTLENIKKAGLLEQDQHRADSYKKVKKIIDEYHKAFIEKSLSNFELKYQSEDKLDSLEEYLMYYSMKRIEKTEKDKFAKIQDNLRKQIADHLKGDESYKTIFSKDLIRKNLPDFVKSDEERTLIKEFKDFTTYFKGFYENRENMYSAEDKSTAISHRIIHENLPKFVDNINAFSKIILIPELREKLNQIYQDFEEYLNVESIDEIFHLDYFSMVMTQKQIEVYNAIIGGKSTNDKKIQGLNEYINLYNQKHKDCKLPKLKLLFKQILSDRIAISWLPDNFKDDQEALDSIDTCYKNLLNDGNVLGEGNLKLLLENIDTYNLKGIFIRNDLQLTDISQKMYASWNVIQDAVILDLKKQVSRKKKESAEDYNDRLKKLYTSQESFSIQYLNDCLRAYGKTENIQDYFAKLGAVNNEHEQTINLFAQVRNAYTSVQAILTTPYPENANLAQDKETVALIKNLLDSLKRLQRFIKPLLGKGDESDKDERFYGDFTPLWETLNQITPLYNMVRNYMTRKPYSQEKIKLNFENSTLLGGWDLNKEHDNTAIILRKNGLYYLAIMKKSANKIFDKDKLDNSGDCYEKMVYKLLPGANKMLPKVFFSKSRIDEFKPSENIIENYKKGTHKKGANFNLADCHNLIDFFKSSISKHEDWSKFNFHFSDTSSYEDLSDFYREVEQQGYSISFCDVSVEYINKMVEKGDLYLFQIYNKDFSEFSKGTPNMHTLYWNSLFSKENLNNIIYKLNGQAEIFFRKKSLNYKRPTHPAHQAIKNKNKCNEKKESIFDYDLVKDKRYTVDKFQFHVPITMNFKSTGNTNINQQVIDYLRTEDDTHIIGIDRGERHLLYLVVIDSHGKIVEQFTLNEIVNEYGGNIYRTNYHDLLDTREQNREKARESWQTIENIKELKEGYISQVIHKITDLMQKYHAVVVLEDLNMGFMRGRQKVEKQVYQKFEEMLINKLNYLVNKKADQNSAGGLLHAYQLTSKFESFQKLGKQSGFLFYIPAWNTSKIDPVTGFVNLFDTRYESIDKAKAFFGKFDSIRYNADKDWFEFAFDYNNFTTKAEGTRTNWTICTYGSRIRTFRNQAKNSQWDNEEIDLTKAYKAFFAKHGINIYDNIKEAIAMETEKSFFEDLLHLLKLTLQMRNSITGTTTDYLISPVHDSKGNFYDSRICDNSLPANADANGAYNIARKGLMLIQQIKDSTSSNRFKFSPITNKDWLIFAQEKPYLNDHHHHHHHHHH

SEQ ID NO: 141 - protein, 1249 aa, Artificial Sequence
  Synthetic sequence
MAPKKKRKVMHENNGKIADNFIGIYPVSKTLRFELKPVGKTQEYIEKHGILDEDLKRAGDYKSVKKIIDAYHKYFIDEALNGIQLDGLKNYYELYEKKRDNNEEKEFQKIQMSLRKQIVKRFSEHPQYKYLFKKELIKNVLPEFTKDNAEEQTLVKSFQEFTTYFEGFHQNRKNMYSDEEKSTAIAYRVVHQNLPKYIDNMRIFSMILNTDIRSDLTELFNNLKTKMDITIVEEYFAIDGFNKVVNQKGIDVYNTILGAFSTDDNTKIKGLNEYINLYNQKNKAKLPKLKPLFKQILSDRDKISFIPEQFDSDTEVLEAVDMFYNRLLQFVIENEGQITISKLLTNFSAYDLNKIYVKNDTTISAISNDLFDDWSYISKAVRENYDSENVDKNKRAAAYEEKKEKALSKIKMYSIEELNFFVKKYSCNECHIEGYFERRILEILDKMRYAYESCKILHDKGLINNISLCQDRQAISELKDFLDSIKEVQWLLKPLMIGQEQADKEEAFYTELLRIWEELEPITLLYNKVRNYVTKKPYTLEKVKLNFYKSTLLDGWDKNKEKDNLGIILLKDGQYYLGIMNRRNNKIADDAPLAKTDNVYRKMEYKLLTKVSANLPRIFLKDKYNPSEEMLEKYEKGTHLKGENFCIDDCRELIDFFKKGIKQYEDWGQFDFKFSDTESYDDISAFYKEVEHQGYKITFRDIDETYIDSLVNEGKLYLFQIYNKDFSPYSKGTKNLHTLYWEMLFSQQNLQNIVYKLNGNAEIFYRKASINQKDVVVHKADLPIKNKDPQNSKKESMFDYDIIKDKRFTCDKYQFHVPITMNFKALGENHFNRKVNRLIHDAENMHIIGIDRGERNLIYLCMIDMKGNIVKQISLNEIISYDKNKLEHKRNYHQLLKTREDENKSARQSWQTIHTIKELKEGYLSQVIHVITDLMVEYNAIVVLEDLNFGFKQGRQKFERQVYQKFEKMLIDKLNYLVDKSKGMDEDGGLLHAYQLTDEFKSFKQLGKQSGFLYYIPAWNTSKLDPTTGFVNLFYTKYESVEKSKEFINNFTSILYNQEREYFEFLFDYSAFTSKAEGSRLKWTVCSKGERVETYRNPKKNNEWDTQKIDLTFELKKLFNDYSISLLDGDLREQMGKIDKADFYKKFMKLFALIVQMRNSDEREDKLISPVLNKYGAFFETGKNERMPLDADANGAYNIARKGLWIIEKIKNTDVEQLDKVKLTISNKEWLQYAQEHILHHHHHHHHHH

SEQ ID NO: 142 - protein, 1266 aa, Artificial Sequence
  Synthetic sequence
MAPKKKRKVMQINNLKIIYMKFTDFTGLYSLSKTLRFELKPIGKTLENIKKAGLLEQDQHRADSYKKVKKIIDEYHKAFIEKSLSNFELKYQSEDKLDSLEEYLMYYSMKRIEKTEKDKFAKIQDNLRKQIADHLKGDESYKTIFSKDLIRKNLPDFVKSDEERTLIKEFKDFTTYFKGFYENRENMYSAEDKSTAISHRIIHENLPKFVDNINAFSKIILIPELREKLNQIYQDFEEYLNVESIDEIFHLDYFSMVMTQKQIEVYNAIIGGKSTNDKKIQGLNEYINLYNQKHKDCKLPKLKLLFKQILSDRIAISWLPDNFKDDQEALDSIDTCYKNLLNDGNVLGEGNLKLLLENIDTYNLKGIFIRNDLQLTDISQKMYASWNVIQDAVILDLKKQVSRKKKESAEDYNDRLKKLYTSQESFSIQYLNDCLRAYGKTENIQDYFAKLGAVNNEHEQTINLFAQVRNAYTSVQAILTTPYPENANLAQDKETVALIKNLLDSLKRLQRFIKPLLGKGDESDKDERFYGDFTPLWETLNQITPLYNMVRNYMTRKPYSQEKIKLNFENSTLLGGWDLNKEHDNTAIILRKNGLYYLAIMKKSANKIFDKDKLDNSGDCYEKMVYKLLPGANKMLPKVFFSKSRIDEFKPSENIIENYKKGTHKKGANFNLADCHNLIDFFKSSISKHEDWSKFNFHFSDTSSYEDLSDFYREVEQQGYSISFCDVSVEYINKMVEKGDLYLFQIYNKDFSEFSKGTPNMHTLYWNSLFSKENLNNIIYKLNGQAEIFFRKKSLNYKRPTHPAHQAIKNKNKCNEKKESIFDYDLVKDKRYTVDKFQFHVPITMNFKSTGNTNINQQVIDYLRTEDDTHIIGIDRGERHLLYLVVIDSHGKIVEQFTLNEIVNEYGGNIYRTNYHDLLDTREQNREKARESWQTIENIKELKEGYISQVIHKITDLMQKYHAVVVLEDLNMGFMRGRQKVEKQVYQKFEEMLINKLNYLVNKKADQNSAGGLLHAYQLTSKFESFQKLGKQSGFLFYIPAWNTSKIDPVTGFVNLFDTRYESIDKAKAFFGKFDSIRYNADKDWFEFAFDYNNFTTKAEGTRTNWTICTYGSRIRTFRNQAKNSQWDNEEIDLTKAYKAFFAKHGINIYDNIKEAIAMETEKSFFEDLLHLLKLTLQMRNSITGTTTDYLISPVHDSKGNFYDSRICDNSLPANADANGAYNIARKGLMLIQQIKDSTSSNRFKFSPITNKDWLIFAQEKPYLND

SEQ ID NO: 143 - protein, 1266 aa, Artificial Sequence
  Synthetic sequence
MAPKKKRKVMQINNLKIIYMKFTDFTGLYSLSKTLRFELKPIGKTLENIKKAGLLEQDQHRADSYKKVKKIIDEYHKAFIEKSLSNFELKYQSEDKLDSLEEYLMYYSMKRIEKTEKDKFAKIQDNLRKQIADHLKGDESYKTIFSKDLIRKNLPDFVKSDEERTLIKEFKDFTTYFKGFYRNRENMYSAEDKSTAISHRIIHENLPKFVDNINAFSKIILIPELREKLNQIYQDFEEYLNVESIDEIFHLDYFSMVMTQKQIEVYNAIIGGKSTNDKKIQGLNEYINLYNQKHKDCKLPKLKLLFKQILSDRIAISWLPDNFKDDQEALDSIDTCYKNLLNDGNVLGEGNLKLLLENIDTYNLKGIFIRNDLQLTDISQKMYASWNVIQDAVILDLKKQVSRKKKESAEDYNDRLKKLYTSQESFSIQYLNDCLRAYGKTENIQDYFAKLGAVNNEHEQTINLFAQVRNAYTSVQAILTTPYPENANLAQDKETVALIKNLLDSLKRLQRFIKPLLGKGDESDKDERFYGDFTPLWETLNQITPLYNMVRNYMTRKPYSQEKIKLNFENSTLLGGWDLNKEHDNTAIILRKNGLYYLAIMKKSANKIFDKDKLDNSGDCYEKMVYKLLPGANKMLPKVFFSKSRIDEFKPSENIIENYKKGTHKKGANFNLADCHNLIDFFKSSISKHEDWSKFNFHFSDTSSYEDLSDFYREVEQQGYSISFCDVSVEYINKMVEKGDLYLFQIYNKDFSEFSKGTPNMHTLYWNSLFSKENLNNIIYKLNGQAEIFFRKKSLNYKRPTHPAHQAIKNKNKCNEKKESIFDYDLVKDKRYTVDKFQFHVPITMNFKSTGNTNINQQVIDYLRTEDDTHIIGIDRGERHLLYLVVIDSHGKIVEQFTLNEIVNEYGGNIYRTNYHDLLDTREQNREKARESWQTIENIKELKEGYISQVIHKITDLMQKYHAVVVLEDLNMGFMRGRQKVEKQVYQKFEEMLINKLNYLVNKKADQNSAGGLLHAYQLTSKFESFQKLGKQSGFLFYIPAWNTSKIDPVTGFVNLFDTRYESIDKAKAFFGKFDSIRYNADKDWFEFAFDYNNFTTKAEGTRTNWTICTYGSRIRTFRNQAKNSQWDNEEIDLTKAYKAFFAKHGINIYDNIKEAIAMETEKSFFEDLLHLLKLTLQMRNSITGTTTDYLISPVHDSKGNFYDSRICDNSLPANADANGAYNIARKGLMLIQQIKDSTSSNRFKFSPITNKDWLIFAQEKPYLND

SEQ ID NO: 144 - protein, 1273 aa, Artificial Sequence
  Synthetic sequence
MAPKKKRKVMLFQDFTHLYPLSKTMRFELKPIGKTLEHIHAKNFLSQDETMADMYQKVKAILDDYHRDFIADMMGEVKLTKLAEFYDVYLKFRKNPKDDGLQKQLKDLQAVLRKEIVKPIGNGGKYKAGYDRLFGAKLFKDGKELGDLAKFVIAQEGESSPKLAHLAHFEKFSTYFTGFHDNRKNMYSDEDKHTAITYRLIHENLPRFIDNLQILATIKQKHSALYDQIINELTASGLDVSLASHLDGYHKLLTQEGITAYNTLLGGISGEAGSRKIQGINELINSHHNQHCHKSERIAKLRPLHKQILSDGMGVSFLPSKFADDSEMCQAVNEFYRHYADVFAKVQSLFDGFDDHQKDGIYVEHKNLNELSKQAFGDFALLGRVLDGYYVDVVNPEFNERFAKAKTDNAKAKLTKEKDKFIKGVHSLASLEQAIEHYTARHDDESVQAGKLGQYFKHGLAGVDNPIQKIHNNHSTIKGFLERERPAGERALPKIKSGKNPEMTQLRQLKELLDNALNVAHFAKLLTTKTTLDNQDGNFYGEFGALYDELAKIPTLYNKVRDYLSQKPFSTEKYKLNFGNPTLLNGWDLNKEKDNFGIILQKDGCYYLALLDKAHKKVFDNAPNTGKNVYQKMIYKLLPGPNKMLPKVFFAKSNLDYYNPSAELLDKYAQGTHKKGNNFNLKDCHALIDFFKAGINKHPEWQHFGFKFSPTSSYQDLSDFYREVEPQGYQVKFVDINADYINELVEQGQLYLFQIYNKDFSPKAHGKPNLHTLYFKALFSKDNLANPIYKLNGEAQIFYRKASLDMNETTIHRAGEVLENKNPDNPKKRQFVYDIIKDKRYTQDKFMLHVPITMNFGVQGMTIKEFNKKVNQSIQQYDEVNVIGIDRGERHLLYLTVINSKGEILEQRSLNDITTASANGTQMTTPYHKILDKREIERLNARVGWGEIETIKELKSGYLSHVVHQISQLMLKYNAIVVLEDLNFGFKRGRFKVEKQIYQNFENALIKKLNHLVLKDEADDEIGSYKNALQLTNNFTDLKSIGKQTGFLFYVPAWNTSKIDPETGFVDLLKPRYENIAQSQAFFGKFDKICYNADKDYFEFHIDYAKFTDKAKNSRQIWKICSHGDKRYVYDKTANQNKGATKGINVNDELKSLFARHHINDKQPNLVMDICQNNDKEFHKSLIYLLKTLLALRYSNASSDEDFILSPVANDEGMFFNSALADDTQPQNADANGAYHIALKGLWVLEQIKNSDDLNKVKLAIDNQTWLNFAQNR

SEQ ID NO: 145 - protein, 1273 aa, Artificial Sequence
  Synthetic sequence
MAPKKKRKVMLFQDFTHLYPLSKTMRFELKPIGKTLEHIHAKNFLSQDETMADMYQKVKAILDDYHRDFIADMMGEVKLTKLAEFYDVYLKFRKNPKDDGLQKQLKDLQAVLRKEIVKPIGNGGKYKAGYDRLFGAKLFKDGKELGDLAKFVIAQEGESSPKLAHLAHFEKFSTYFTGFHRNRKNMYSDEDKHTAITYRLIHENLPRFIDNLQILATIKQKHSALYDQIINELTASGLDVSLASHLDGYHKLLTQEGITAYNTLLGGISGEAGSRKIQGINELINSHHNQHCHKSERIAKLRPLHKQILSDGMGVSFLPSKFADDSEMCQAVNEFYRHYADVFAKVQSLFDGFDDHQKDGIYVEHKNLNELSKQAFGDFALLGRVLDGYYVDVVNPEFNERFAKAKTDNAKAKLTKEKDKFIKGVHSLASLEQAIEHYTARHDDESVQAGKLGQYFKHGLAGVDNPIQKIHNNHSTIKGFLERERPAGERALPKIKSGKNPEMTQLRQLKELLDNALNVAHFAKLLTTKTTLDNQDGNFYGEFGALYDELAKIPTLYNKVRDYLSQKPFSTEKYKLNFGNPTLLNGWDLNKEKDNFGIILQKDGCYYLALLDKAHKKVFDNAPNTGKNVYQKMIYKLLPGPNKMLPKVFFAKSNLDYYNPSAELLDKYAQGTHKKGNNFNLKDCHALIDFFKAGINKHPEWQHFGFKFSPTSSYQDLSDFYREVEPQGYQVKFVDINADYINELVEQGQLYLFQIYNKDFSPKAHGKPNLHTLYFKALFSKDNLANPIYKLNGEAQIFYRKASLDMNETTIHRAGEVLENKNPDNPKKRQFVYDIIKDKRYTQDKFMLHVPITMNFGVQGMTIKEFNKKVNQSIQQYDEVNVIGIDRGERHLLYLTVINSKGEILEQRSLNDITTASANGTQMTTPYHKILDKREIERLNARVGWGEIETIKELKSGYLSHVVHQISQLMLKYNAIVVLEDLNFGFKRGRFKVEKQIYQNFENALIKKLNHLVLKDEADDEIGSYKNALQLTNNFTDLKSIGKQTGFLFYVPAWNTSKIDPETGFVDLLKPRYENIAQSQAFFGKFDKICYNADKDYFEFHIDYAKFTDKAKNSRQIWKICSHGDKRYVYDKTANQNKGATKGINVNDELKSLFARHHINDKQPNLVMDICQNNDKEFHKSLIYLLKTLLALRYSNASSDEDFILSPVANDEGMFFNSALADDTQPQNADANGAYHIALKGLWVLEQIKNSDDLNKVKLAIDNQTWLNFAQNR

We claim:

1. A method of modifying a nucleotide sequence at a target site in the genome of a eukaryotic or a prokaryotic cell comprising:
introducing into said eukaryotic or prokaryotic cell
(i) a DNA-targeting RNA, or a DNA polynucleotide encoding a DNA-targeting RNA, wherein the DNA-targeting RNA comprises: (a) a first segment comprising a nucleotide sequence that is complementary to a targeted sequence in the genome of said eukaryotic or prokaryotic cell; and (b) a second segment that comprises a sequence selected from the group consisting of SEQ ID NOs:12-17; and
(ii) a Cpf1 polypeptide, or a polynucleotide encoding a Cpf1 polypeptide, wherein the Cpf1 polypeptide comprises: (a) an RNA-binding portion that interacts with the DNA-targeting RNA; and (b) an activity portion that exhibits site-directed enzymatic activity,
wherein said Cpf1 polypeptide shares at least 95% identity with a sequence selected from the group consisting of SEQ ID NOs: 9-11, 39-43, 45, 47-53, and 67, wherein said Cpf1 polypeptide is a non-naturally occurring Cpf1 polypeptide that comprises at least one mutation relative to a wild-type Cpf1 polypeptide, wherein said genome of the eukaryotic or prokaryotic cell comprises a nuclear, plastid, mitochondrial, chromosomal, plasmid, or other intracellular DNA sequence, wherein said targeted sequence is located immediately 3′ of a PAM site in the genome, and wherein said Cpf1 polypeptide recognizes a TTTC PAM site and has Cpf1 nuclease activity.

2. The method of claim 1, further comprising:
culturing the eukaryotic or prokaryotic cell under conditions in which the Cpf1 polypeptide is expressed and cleaves the nucleotide sequence at the target site to produce a modified nucleotide sequence; and
selecting a eukaryotic or prokaryotic cell comprising said modified nucleotide sequence.

3. The method of claim 1, wherein said method is performed at a temperature that is less than 32° C.

4. The method of claim 1, wherein said modified nucleotide sequence comprises insertion of heterologous DNA into the genome of the cell, deletion of a nucleotide sequence from the genome of the cell, or mutation of at least one nucleotide in the genome of the eukaryotic or prokaryotic cell.

5. The method of claim 1, wherein said modified nucleotide sequence comprises insertion of a polynucleotide that encodes a protein capable of conferring antibiotic or herbicide tolerance to transformed cells.

6. A composition comprising a polynucleotide sequence encoding a Cpf1 polypeptide, wherein said polynucleotide sequence shares at least 95% identity with a sequence selected from the group consisting of SEQ ID NOs: 25 and 27, or wherein said polynucleotide sequence encodes a Cpf1 polypeptide that shares at least 95% identity with a sequence selected from the group consisting of SEQ ID NOs: 9-11, 39-43, 45, and 47-53, wherein said Cpf1 polypeptide is a non-naturally occurring Cpf1 polypeptide that comprises at least one mutation relative to a wild-type Cpf1 polypeptide, and wherein said polynucleotide sequence encoding a Cpf1 polypeptide is operably linked to a promoter that is heterologous to the polynucleotide sequence encoding a Cpf1 polypeptide.

7. The composition of claim 6, wherein said Cpf1 polypeptide comprises one or more mutations in one or more positions corresponding to positions 877 or 971 of SEQ ID NO: 3 when aligned for maximum identity.

8. A eukaryotic or prokaryotic cell comprising the polynucleotide sequence encoding a Cpf1 polypeptide of claim 6.

9. A plant cell comprising the polynucleotide sequence encoding a Cpf1 polypeptide of claim 6.

10. A plant regenerated from the plant cell of claim 9, wherein said regenerated plant comprises said polynucleotide sequence encoding a Cpf1 polypeptide.

11. A plant produced by the method of claim 2 comprising said polynucleotide sequence encoding a Cpf1 polypeptide.

12. A seed of the plant of claim 10 comprising said polynucleotide sequence encoding a Cpf1 polypeptide.

13. The composition of claim 6, wherein said polynucleotide sequence encoding a Cpf1 polypeptide is codon-optimized for expression in a plant cell.

14. The method of claim 1, wherein said Cpf1 polypeptide comprises a sequence selected from the group consisting of SEQ ID NOs: 9-11, 39-43, 45, and 47-53.

15. The composition of claim 6, wherein said Cpf1 polypeptide comprises a sequence selected from the group consisting of SEQ ID NOs: 9-11, 39-43, 45, and 47-53.

16. The method of claim 1, wherein said non-naturally occurring Cpf1 polypeptide comprises at least two mutations relative to a wild-type Cpf1 polypeptide.

17. The method of claim 16, wherein said non-naturally occurring Cpf1 polypeptide is selected from the group consisting of SEQ ID NOs: 9-11, 39-43, 45, 47-53, and 67.

18. The composition of claim 6, wherein said non-naturally occurring Cpf1 polypeptide comprises at least two mutations relative to a wild-type Cpf1 polypeptide.

19. The composition of claim 18, wherein said non-naturally occurring Cpf1 polypeptide is selected from the group consisting of SEQ ID NOs: 9-11, 39-43, 45, 47-53, and 67.
